(19) United States
(12) Patent Application Publication
(10) Pub. No.: US 2002/0193296 A1
(43) Pub. Date: Dec. 19, 2002

(54) Compositions and methods for the therapy and diagnosis of prostate cancer

(76) Inventors: Jiangchun Xu, Bellevue, WA (US); Davin C. Dillon, Issaquah, WA (US); Jennifer L. Mitcham, Redmond, WA (US); Susan L. Harlocker, Seattle, WA (US); Yuqiu Jiang, Kent, WA (US); Michael D. Kalos, Seattle, WA (US); Gary R. Fanger, Mill Creek, WA (US); Marc W. Retter, Carnation, WA (US); John A. Stolk, Bothell, WA (US); Craig H. Day, Shoreline, WA (US); Thomas S. Vedvick, Federal Way, WA (US); Darrick Carter, Seattle, WA (US); Samuel X. Li, Redmond, WA (US); Aijun Wang, Issaquah, WA (US); Yasir A. W. Skeiky, Bellevue, WA (US); William T. Hepler, Seattle, WA (US); Robert A. Henderson, Edmonds, WA (US); John Hural, Bainbridge Island, WA (US); Patricia D. McNeill, Federal Way, WA (US); Raymond L. Houghton, Bothell, WA (US); Carlota Vinals y de Bassols, Rixensart (BE); Teresa M. Foy, Federal Way, WA (US)

Correspondence Address: SEED INTELLECTUAL PROPERTY LAW GROUP PLLC, 701 FIFTH AVE, SUITE 6300, SEATTLE, WA, 98104-7092, US

(21) Appl. No.: 09/895,814

(22) Filed: Jun. 29, 2001

Related U.S. Application Data
(63) Continuation-in-part of application No. 09/852,911, filed on May 9, 2001.
(63) Continuation-in-part of application No. 09/780,669, filed on Feb. 9, 2001.
(63) Continuation-in-part of application No. 09/759,143, filed on Jan. 12, 2001.
(63) Continuation-in-part of application No. 09/709,729, filed on Nov. 9, 2000, now abandoned.
(63) Continuation-in-part of application No. 09/685,166, filed on Oct. 10, 2000.
(63) Continuation-in-part of application No. 09/679,426, filed on Oct. 2, 2000.
(63) Continuation-in-part of application No. 09/657,279, filed on Sep. 6, 2000.
(63) Continuation-in-part of application No. 09/651,236, filed on Aug. 29, 2000.
(63) Continuation-in-part of application No. 09/636,215, filed on Aug. 9, 2000.
(63) Continuation-in-part of application No. 09/605,783, filed on Jun. 27, 2000.
(63) Continuation-in-part of application No. 09/593,793, filed on Jun. 13, 2000.
(63) Continuation-in-part of application No. 09/570,737, filed on May 12, 2000.
(63) Continuation-in-part of application No. 09/568,100, filed on May 9, 2000.
(63) Continuation-in-part of application No. 09/536,857, filed on Mar. 27, 2000, now abandoned.
(63) Continuation-in-part of application No. 09/483,672, filed on Jan. 14, 2000.
(63) Continuation-in-part of application No. 09/443,686, filed on Nov. 18, 1999, now abandoned.
(63) Continuation-in-part of application No. 09/439,313, filed on Nov. 12, 1999.
(63) Continuation-in-part of application No. 09/352,616, filed on Jul. 13, 1999.
(63) Continuation-in-part of application No. 09/288,946, filed on Apr. 9, 1999.
(63) Continuation-in-part of application No. 09/232,149, filed on Jan. 15, 1999.
(63) Continuation-in-part of application No. 09/159,812, filed on Sep. 23, 1998.
(63) Continuation-in-part of application No. 09/115,453, filed on Jul. 14, 1998.
(63) Continuation-in-part of application No. 09/030,607, filed on Feb. 25, 1998.
(63) Continuation-in-part of application No. 09/020,956, filed on Feb. 9, 1998.
(63) Continuation-in-part of application No. 08/904,804, filed on Aug. 1, 1997, now abandoned.
(63) Continuation-in-part of application No. 08/806,099, filed on Feb. 25, 1997, now abandoned.

(51) Int. Cl. A61K 38/17; C12Q 1/68; C07H 21/04; C12N 9/00; C12P 21/02; C12N 5/06; C07K 14/435

(52) U.S. Cl. 514/12; 435/6; 435/69.1; 435/183; 435/325; 435/320.1; 536/23.2

(57) ABSTRACT

Compositions and methods for the therapy and diagnosis of cancer, particularly prostate cancer, are disclosed. Illustrative compositions comprise one or more prostate-specific polypeptides, immunogenic portions thereof, polynucleotides that encode such polypeptides, antigen presenting cell that expresses such polypeptides, and T cells that are specific for cells expressing such polypeptides. The disclosed compositions are useful, for example, in the diagnosis, prevention and/or treatment of diseases, particularly prostate cancer.

### CROSS REFERENCE TO RELATED APPLICATIONS

[0001] This application is related to U.S. patent application Ser. No. 09/852,911, filed May 9, 2001; U.S. patent application Ser. No. 09/780,669, filed Feb. 9, 2001; U.S. patent application Ser. No. 09/759,143, filed Jan. 12, 2001; U.S. patent application Ser. No. 09/709,729, filed Nov. 9, 2000; U.S. patent application Ser. No. 09/685,166, filed Oct. 10, 2000; U.S. patent application Ser. No. 09/679,426, filed Oct. 2, 2000; U.S. patent application Ser. No. 09/657,279, filed Sep. 6, 2000; U.S. application Ser. No. 09/651,236, filed Aug. 29, 2000; U.S. application Ser. No. 09/636,215, filed Aug. 9, 2000; U.S. application Ser. No. 09/605,783, filed Jun. 27, 2000; U.S. application Ser. No. 09/593,793, filed Jun. 13, 2000; U.S. application Ser. No. 09/570,737, filed May 12, 2000; U.S. application Ser. No. 09/568,100, filed May 9, 2000; U.S. application Ser. No. 09/536,857, filed Mar. 27, 2000; U.S. application Ser. No. 09/483,672, filed Jan. 14, 2000; U.S. application Ser. No. 09/443,686, filed Nov. 18, 1999; U.S. application Ser. No. 09/439,313, filed Nov. 12, 1999; U.S. application Ser. No. 09/352,616, filed Jul. 13, 1999; U.S. application Ser. No. 09/288,946, filed Apr. 9, 1999; U.S. application Ser. No. 09/232,149, filed Jan. 15, 1999; U.S. application Ser. No. 09/159,812, filed Sep. 23, 1998; U.S. application Ser. No. 09/115,453, filed Jul. 14, 1998; U.S. application Ser. No. 09/030,607, filed Feb. 25, 1998; U.S. application Ser. No. 09/020,956, filed Feb. 9, 1998; U.S. application Ser. No. 08/904,804, filed Aug. 1, 1997 (abandoned); U.S. application Ser. No. 08/806,099, filed Feb. 25, 1997 (abandoned); each a CIP of the previously filed application and pending unless noted, and all incorporated in their entirety herein by reference.

### TECHNICAL FIELD OF THE INVENTION

[0002] The present invention relates generally to therapy and diagnosis of cancer, such as prostate cancer. The invention is more specifically related to polypeptides, comprising at least a portion of a prostate-specific protein, and to polynucleotides encoding such polypeptides. Such polypeptides and polynucleotides are useful in pharmaceutical compositions, e.g., vaccines, and other compositions for the diagnosis and treatment of prostate cancer.

### BACKGROUND OF THE INVENTION

[0003] Cancer is a significant health problem throughout the world. Although advances have been made in detection and therapy of cancer, no vaccine or other universally successful method for prevention or treatment is currently available. Current therapies, which are generally based on a combination of chemotherapy or surgery and radiation, continue to prove inadequate in many patients.

[0004] Prostate cancer is the most common form of cancer among males, with an estimated incidence of 30% in men over the age of 50. Overwhelming clinical evidence shows that human prostate cancer has the propensity to metastasize to bone, and the disease appears to progress inevitably from androgen dependent to androgen refractory status, leading to increased patient mortality. This prevalent disease is currently the second leading cause of cancer death among men in the U.S.

[0005] In spite of considerable research into therapies for the disease, prostate cancer remains difficult to treat. Commonly, treatment is based on surgery and/or radiation therapy, but these methods are ineffective in a significant percentage of cases. Two previously identified prostate specific proteins—prostate specific antigen (PSA) and prostatic acid phosphatase (PAP)—have limited therapeutic and diagnostic potential. For example, PSA levels do not always correlate well with the presence of prostate cancer, being positive in a percentage of non-prostate cancer cases, including benign prostatic hyperplasia (BPH). Furthermore, PSA measurements correlate with prostate volume, and do not indicate the level of metastasis.

[0006] In spite of considerable research into therapies for these and other cancers, prostate cancer remains difficult to diagnose and treat effectively. Accordingly, there is a need in the art for improved methods for detecting and treating such cancers. The present invention fulfills these needs and further provides other related advantages.

### SUMMARY OF THE INVENTION

[0007] In one aspect, the present invention provides polynucleotide compositions comprising a sequence selected from the group consisting of:

[0008] (a) sequences provided in SEQ ID NO: 1-111, 115-171, 173-175, 177, 179-305, 307-315, 326, 328, 330, 332-335, 340-375, 381, 382 and 384-476, 524, 526, 530, 531, 533, 535, 536, 552, 569-572, 587, 591, 593-606, 618-705, 709-774, 777, 789, 817, 823, 824, 878, 880-882, 894, 896, 907, 908, 916-919, 929-931, 938, 939, 942, 944, 945, 948, 967 and 969-976;

[0009] (b) complements of the sequences provided in SEQ ID NO: 1-111, 115-171, 173-175, 177, 179-305, 307-315, 326, 328, 330, 332-335, 340-375, 381, 382 and 384-476, 524, 526, 530, 531, 533, 535, 536, 552, 569-572, 587, 591, 593-606, 618-705, 709-774, 777, 789, 817, 823, 824, 878, 880-882, 894, 896, 907, 908, 916-919, 929-931, 938, 939, 942, 944, 945, 948, 967 and 969-976;

[0010] (c) sequences consisting of at least 20 contiguous residues of a sequence provided in SEQ ID NO: 1-111, 115-171, 173-175, 177, 179-305, 307-315, 326, 328, 330, 332-335, 340-375, 381, 382 and 384-476, 524, 526, 530, 531, 533, 535, 536, 552, 569-572, 587, 591, 593-606, 618-705, 709-774, 777, 789, 817, 823, 824, 878, 880-882, 894, 896, 907, 908, 916-919, 929-931, 938, 939, 942, 944, 945, 948, 967 and 969-976;

[0011] (d) sequences that hybridize to a sequence provided in SEQ ID NO: 1-111, 115-171, 173-175, 177, 179-305, 307-315, 326, 328, 330, 332-335, 340-375, 381, 382 and 384-476, 524, 526, 530, 531, 533, 535, 536, 552, 569-572, 587, 591, 593-606, 618-705, 709-774, 777, 789, 817, 823, 824, 878, 880-882, 894, 896, 907, 908, 916-919, 929-931, 938, 939, 942, 944, 945, 948, 967 and 969-976, under moderately stringent conditions;

[0012] (e) sequences having at least 75% identity to a sequence of SEQ ID NO: 1-111, 115-171, 173-175, 177, 179-305, 307-315, 326, 328, 330, 332-335, 340-375, 381, 382 and 384-476, 524, 526, 530, 531, 533, 535, 536, 552, 569-572, 587, 591, 593-606, 618-705, 709-774, 777, 789, 817, 823, 824, 878, 880-882, 894, 896, 907, 908, 916-919, 929-931, 938, 939, 942, 944, 945, 948, 967 and 969-976;

[0013] (f) sequences having at least 90% identity to a sequence of SEQ ID NO: 1-111, 115-171, 173-175, 177, 179-305, 307-315, 326, 328, 330, 332-335, 340-375, 381, 382 and 384-476, 524, 526, 530, 531, 533, 535, 536, 552, 569-572, 587, 591, 593-606, 618-705, 709-774, 777, 789, 817, 823, 824, 878, 880-882, 894, 896, 907, 908, 916-919, 929-931, 938, 939, 942, 944, 945, 948, 967 and 969-976; and

[0014] (g) degenerate variants of a sequence provided in SEQ ID NO: 1-111, 115-171, 173-175, 177, 179-305, 307-315, 326, 328, 330, 332-335, 340-375, 381, 382 and 384-476, 524, 526, 530, 531, 533, 535, 536, 552, 569-572, 587, 591, 593-606, 618-705, 709-774, 777, 789, 817, 823, 824, 878, 880-882, 894, 896, 907, 908, 916-919, 929-931, 938, 939, 942, 944, 945, 948, 967 and 969-976.

[0015] In one preferred embodiment, the polynucleotide compositions of the invention are expressed in at least about 20%, more preferably in at least about 30%, and most preferably in at least about 50% of prostate tissue samples tested, at a level that is at least about 2-fold, preferably at least about 5-fold, and most preferably at least about 10-fold higher than that for other normal tissues.

[0016] The present invention, in another aspect, provides polypeptide compositions comprising an amino acid sequence that is encoded by a polynucleotide sequence described above.

[0017] The present invention further provides polypeptide compositions comprising an amino acid sequence selected from the group consisting of sequences recited in SEQ ID NO: 112-114, 172, 176, 178, 327, 329, 331, 336, 339, 376-380, 383, 477-483, 496, 504, 505, 519, 520, 522, 525, 527, 532, 534, 537-551, 553-568, 573-586, 588-590, 592, 706-708, 775, 776, 778, 780, 781, 811, 814, 818, 826, 827, 853, 855, 858, 860-862, 866-877, 879, 883-893, 895, 897, 898, 909-915, 920-928, 932-934, 940, 941, 943, 946, 947, 949-966, 968 and 977-990.

[0018] In certain preferred embodiments, the polypeptides and/or polynucleotides of the present invention are immunogenic, i.e., they are capable of eliciting an immune response, particularly a humoral and/or cellular immune response, as further described herein.

[0019] The present invention further provides fragments, variants and/or derivatives of the disclosed polypeptide and/or polynucleotide sequences, wherein the fragments, variants and/or derivatives preferably have a level of immunogenic activity of at least about 50%, preferably at least about 70% and more preferably at least about 90% of the level of immunogenic activity of a polypeptide sequence set forth in SEQ ID NO: 112-114, 172, 176, 178, 327, 329, 331, 336, 339, 376-380, 383, 477-483, 496, 504, 505, 519, 520, 522, 525, 527, 532, 534, 537-551, 553-568, 573-586, 588-590, 592, 706-708, 775, 776, 778, 780, 781, 811, 814, 818, 826, 827, 853, 855, 858 or 860-862, or a polypeptide sequence encoded by a polynucleotide sequence set forth in SEQ ID NO: 1-111, 115-171, 173-175, 177, 179-305, 307-315, 326, 328, 330, 332-335, 340-375, 381, 382 and 384-476, 524, 526, 530, 531, 533, 535, 536, 552, 569-572, 587, 591, 593-606, 618-705, 709-774, 777, 789, 817, 823, 824, 878, 880-882, 894, 896, 907, 908, 916-919, 929-931, 938, 939, 942, 944, 945, 948, 967 and 969-976.

[0020] The present invention further provides polynucleotides that encode a polypeptide described above, expression vectors comprising such polynucleotides and host cells transformed or transfected with such expression vectors.

[0021] Within other aspects, the present invention provides pharmaceutical compositions comprising a polypeptide or polynucleotide as described above and a physiologically acceptable carrier.

[0022] Within a related aspect of the present invention, pharmaceutical compositions, e.g., vaccine compositions, are provided for prophylactic or therapeutic applications. Such compositions generally comprise an immunogenic polypeptide or polynucleotide of the invention and an immunostimulant, such as an adjuvant, together with a physiologically acceptable carrier.

[0023] The present invention further provides pharmaceutical compositions that comprise: (a) an antibody or antigen-binding fragment thereof that specifically binds to a polypeptide of the present invention, or a fragment thereof, and (b) a physiologically acceptable carrier.

[0024] Within further aspects, the present invention provides pharmaceutical compositions comprising: (a) an antigen presenting cell that expresses a polypeptide as described above and (b) a pharmaceutically acceptable carrier or excipient. Illustrative antigen presenting cells include dendritic cells, macrophages, monocytes, fibroblasts and B cells.

[0025] Within related aspects, pharmaceutical compositions are provided that comprise: (a) an antigen presenting cell that expresses a polypeptide as described above and (b) an immunostimulant.

[0026] The present invention further provides, in other aspects, fusion proteins that comprise at least one polypeptide as described above, as well as polynucleotides encoding such fusion proteins, typically in the form of pharmaceutical compositions, e.g., vaccine compositions, comprising a physiologically acceptable carrier and/or an immunostimulant. The fusions proteins may comprise multiple immunogenic polypeptides or portions/variants thereof, as described herein, and may further comprise one or more polypeptide segments for facilitating and/or enhancing the expression, purification and/or immunogenicity of the polypeptide(s).

[0027] Within further aspects, the present invention provides methods for stimulating an immune response in a patient, preferably a T cell response in a human patient, comprising administering a pharmaceutical composition described herein. The patient may be afflicted with prostate cancer, in which case the methods provide treatment for the disease, or a patient considered to be at risk for such a disease may be treated prophylactically.

[0028] Within further aspects, the present invention provides methods for inhibiting the development of a cancer in a patient, comprising administering to a patient a pharmaceutical composition as recited above. The patient may be afflicted with prostate cancer, in which case the methods provide treatment for the disease, or a patient considered to be at risk for such a disease may be treated prophylactically.

[0029] The present invention further provides, within other aspects, methods for removing tumor cells from a biological sample, comprising contacting a biological sample with T cells that specifically react with a polypeptide of the present invention, wherein the step of contacting is performed under conditions and for a time sufficient to permit the removal of cells expressing the polypeptide from the sample.

[0030] Within related aspects, methods are provided for inhibiting the development of a cancer in a patient, comprising administering to a patient a biological sample treated as described above.

[0031] Methods are further provided, within other aspects, for stimulating and/or expanding T cells specific for a polypeptide of the present invention, comprising contacting T cells with one or more of: (i) a polypeptide as described above; (ii) a polynucleotide encoding such a polypeptide; and (iii) an antigen presenting cell that expresses such a polypeptide; under conditions and for a time sufficient to permit the stimulation and/or expansion of T cells. Isolated T cell populations comprising T cells prepared as described above are also provided.

[0032] Within further aspects, the present invention provides methods for inhibiting the development of a cancer in a patient, comprising administering to a patient an effective amount of a T cell population as described above.

[0033] The present invention further provides methods for inhibiting the development of a cancer in a patient, comprising the steps of: (a) incubating CD4⁺ and/or CD8⁺ T cells isolated from a patient with one or more of: (i) a polypeptide comprising at least an immunogenic portion of polypeptide disclosed herein; (ii) a polynucleotide encoding such a polypeptide; and (iii) an antigen-presenting cell that expressed such a polypeptide; and (b) administering to the patient an effective amount of the proliferated T cells, thereby inhibiting the development of a cancer in the patient. Proliferated cells may, but need not, be cloned prior to administration to the patient.

[0034] Within further aspects, the present invention provides methods for determining the presence or absence of a cancer, preferably a prostate cancer, in a patient comprising: (a) contacting a biological sample obtained from a patient with a binding agent that binds to a polypeptide as recited above; (b) detecting in the sample an amount of polypeptide that binds to the binding agent; and (c) comparing the amount of polypeptide with a predetermined cut-off value, and therefrom determining the presence or absence of a cancer in the patient. Within preferred embodiments, the binding agent is an antibody, more preferably a monoclonal antibody.

[0035] The present invention also provides, within other aspects, methods for monitoring the progression of a cancer in a patient. Such methods comprise the steps of: (a) contacting a biological sample obtained from a patient at a first point in time with a binding agent that binds to a polypeptide as recited above; (b) detecting in the sample an amount of polypeptide that binds to the binding agent; (c) repeating steps (a) and (b) using a biological sample obtained from the patient at a subsequent point in time; and (d) comparing the amount of polypeptide detected in step (c) with the amount detected in step (b), and therefrom monitoring the progression of the cancer in the patient.

[0036] The present invention further provides, within other aspects, methods for determining the presence or absence of a cancer in a patient, comprising the steps of: (a) contacting a biological sample obtained from a patient with an oligonucleotide that hybridizes to a polynucleotide of the present invention; (b) detecting in the sample a level of a polynucleotide, preferably mRNA, that hybridizes to the oligonucleotide; and (c) comparing the level of polynucleotide that hybridizes to the oligonucleotide with a predetermined cut-off value, and therefrom determining the presence or absence of a cancer in the patient. Within certain embodiments, the amount of mRNA is detected via polymerase chain reaction using, for example, at least one oligonucleotide primer that hybridizes to a polynucleotide of the present invention, or a complement of such a polynucleotide. Within other embodiments, the amount of mRNA is detected using a hybridization technique, employing an oligonucleotide probe that hybridizes to an inventive polynucleotide, or a complement of such a polynucleotide.

[0037] In related aspects, methods are provided for monitoring the progression of a cancer in a patient, comprising the steps of: (a) contacting a biological sample obtained from a patient with an oligonucleotide that hybridizes to a polynucleotide of the present invention; (b) detecting in the sample an amount of a polynucleotide that hybridizes to the oligonucleotide; (c) repeating steps (a) and (b) using a biological sample obtained from the patient at a subsequent point in time; and (d) comparing the amount of polynucleotide detected in step (c) with the amount detected in step (b), and therefrom monitoring the progression of the cancer in the patient.

[0038] Within further aspects, the present invention provides antibodies, such as monoclonal antibodies, that bind to a polypeptide as described above, as well as diagnostic kits comprising such antibodies. Diagnostic kits comprising one or more oligonucleotide probes or primers as described above are also provided.

[0039] These and other aspects of the present invention will become apparent upon reference to the following detailed description and attached drawings. All references disclosed herein are hereby incorporated by reference in their entirety as if each was incorporated individually.

### BRIEF DESCRIPTION OF THE DRAWINGS AND SEQUENCE IDENTIFIERS

[0040] FIG. 1 illustrates the ability of T cells to kill fibroblasts expressing the representative prostate-specific polypeptide P502S, as compared to control fibroblasts. The percentage lysis is shown as a series of effector:target ratios, as indicated.

[0041] FIGS. 2A and 2B illustrate the ability of T cells to recognize cells expressing the representative prostate-specific polypeptide P502S. In each case, the number of γ-interferon spots is shown for different numbers of responders. In FIG. 2A, data is presented for fibroblasts pulsed with the P2S-12 peptide, as compared to fibroblasts pulsed with a control E75 peptide. In FIG. 2B, data is presented for fibroblasts expressing P502S, as compared to fibroblasts expressing HER-2/neu.

[0042] FIG. 3 represents a peptide competition binding assay showing that the P1S#10 peptide, derived from P501S, binds HLA-A2. Peptide P1S#10 inhibits HLA-A2 restricted presentation of fluM58 peptide to CTL clone D150M58 in TNF release bioassay. D150M58 CTL is specific for the HLA-A2 binding influenza matrix peptide fluM58.

[0043] FIG. 4 illustrates the ability of T cell lines generated from P1S#10 immunized mice to specifically lyse P1S#10-pulsed Jurkat A2Kb targets and P501S-transduced Jurkat A2Kb targets, as compared to EGFP-transduced Jurkat A2Kb. The percent lysis is shown as a series of effector to target ratios, as indicated.

[0044] FIG. 5 illustrates the ability of a T cell clone to recognize and specifically lyse Jurkat A2Kb cells expressing the representative prostate-specific polypeptide P501S, thereby demonstrating that the P1S#10 peptide may be a naturally processed epitope of the P501S polypeptide.

[0045] FIGS. 6A and 6B are graphs illustrating the specificity of a CD8⁺ cell line (3A-1) for a representative prostate-specific antigen (P501S). FIG. 6A shows the results of a ⁵¹Cr release assay. The percent specific lysis is shown as a series of effector:target ratios, as indicated. FIG. 6B shows the production of interferon-gamma by 3A-1 cells stimulated with autologous B-LCL transduced with P501S, at varying effector:target rations as indicated.

[0046] FIG. 7 is a Western blot showing the expression of P501S in baculovirus.

[0047] FIG. 8 illustrates the results of epitope mapping studies on P501S.

[0048] FIG. 9 is a schematic representation of the P501S protein showing the Location of transmembrane domains and predicted intracellular and extracellular domains.

[0049] FIG. 10 is a genomic map showing the location of the prostate genes P775P, P704P, B305D, P712P and P774P within the Cat Eye Syndrome region of chromosome 22q11.2

[0050] FIG. 11 shows the results of an ELISA assay to determine the specificity of rabbit polyclonal antisera raised against P501S.

[0051] SEQ ID NO: 1 is the determined cDNA sequence for F1-13

[0052] SEQ ID NO: 2 is the determined 3′ cDNA sequence for F1-12

[0053] SEQ ID NO: 3 is the determined 5′ cDNA sequence for F1-12

[0054] SEQ ID NO: 4 is the determined 3′ cDNA sequence for F1-16

[0055] SEQ ID NO: 5 is the determined 3′ cDNA sequence for H1-1

[0056] SEQ ID NO: 6 is the determined 3′ cDNA sequence for H1-9

[0057] SEQ ID NO: 7 is the determined 3′ cDNA sequence for H1-4

[0058] SEQ ID NO: 8 is the determined 3′ cDNA sequence for J1-17

[0059] SEQ ID NO: 9 is the determined 5′ cDNA sequence for J1-17

[0060] SEQ ID NO: 10 is the determined 3′ cDNA sequence for L1-12

[0061] SEQ ID NO: 11 is the determined 5′ cDNA sequence for L1-12

[0062] SEQ ID NO: 12 is the determined 3′ cDNA sequence for N1-1862

[0063] SEQ ID NO: 13 is the determined 5′ cDNA sequence for N1-1862

[0064] SEQ ID NO: 14 is the determined 3′ cDNA sequence for J1-13

[0065] SEQ ID NO: 15 is the determined 5′ cDNA sequence for J1-13

[0066] SEQ ID NO: 16 is the determined 3′ cDNA sequence for J1-19

[0067] SEQ ID NO: 17 is the determined 5′ cDNA sequence for J1-19

[0068] SEQ ID NO: 18 is the determined 3′ cDNA sequence for J1-25

[0069] SEQ ID NO: 19 is the determined 5′ cDNA sequence for J3-25

[0070] SEQ ID NO: 20 is the determined 5′ cDNA sequence for J1-24

[0071] SEQ ID NO: 21 is the determined 3′ cDNA sequence for J1-24

[0072] SEQ ID NO: 22 is the determined 5′ cDNA sequence for K1-58

[0073] SEQ ID NO: 23 is the determined 3′ cDNA sequence for K1-58

[0074] SEQ ID NO: 24 is the determined 5′ cDNA sequence for K1-63

[0075] SEQ ID NO: 25 is the determined 3′ cDNA sequence for K1-63

[0076] SEQ ID NO: 26 is the determined 5′ cDNA sequence for L1-4

[0077] SEQ ID NO: 27 is the determined 3′ cDNA sequence for L1-4

[0078] SEQ ID NO: 28 is the determined 5′ cDNA sequence for L1-14

[0079] SEQ ID NO: 29 is the determined 3′ cDNA sequence for L1-14

[0080] SEQ ID NO: 30 is the determined 3′ cDNA sequence for J1-12

[0081] SEQ ID NO: 31 is the determined 3′ cDNA sequence for 31-16

[0082] SEQ ID NO: 32 is the determined 3′ cDNA sequence for J1-21

[0083] SEQ ID NO: 33 is the determined 3′ cDNA sequence for K1-48

[0084] SEQ ID NO: 34 is the determined 3′ cDNA sequence for K1-55

[0085] SEQ ID NO: 35 is the determined 3′ cDNA sequence for L1-2

[0086] SEQ ID NO: 36 is the determined 3′ cDNA sequence for L1-6

[0087] SEQ ID NO: 37 is the determined 3′ cDNA sequence for N1-1858

[0088] SEQ ID NO: 38 is the determined 3′ cDNA sequence for N1-1860

[0089] SEQ ID NO: 39 is the determined 3′ cDNA sequence for N1-1861

[0090] SEQ ID NO: 40 is the determined 3′ cDNA sequence for N1-1864

[0091] SEQ ID NO: 41 is the determined cDNA sequence for P5

[0092] SEQ ID NO: 42 is the determined cDNA sequence for P8

[0093] SEQ ID NO: 43 is the determined cDNA sequence for P9

[0094] SEQ ID NO: 44 is the determined cDNA sequence for P18

[0095] SEQ ID NO: 45 is the determined cDNA sequence for P20

[0096] SEQ ID NO: 46 is the determined cDNA sequence for P29

[0097] SEQ ID NO: 47 is the determined cDNA sequence for P30

[0098] SEQ ID NO: 48 is the determined cDNA sequence for P34

[0099] SEQ ID NO: 49 is the determined cDNA sequence for P36

[0100] SEQ ID NO: 50 is the determined cDNA sequence for P38

[0101] SEQ ID NO: 51 is the determined cDNA sequence for P39

[0102] SEQ ID NO: 52 is the determined cDNA sequence for P42

[0103] SEQ ID NO: 53 is the determined cDNA sequence for P47

[0104] SEQ ID NO: 54 is the determined cDNA sequence for P49

[0105] SEQ ID NO: 55 is the determined cDNA sequence for P50

[0106] SEQ ID NO: 56 is the determined cDNA sequence for P53

[0107] SEQ ID NO: 57 is the determined cDNA sequence for P55

[0108] SEQ ID NO: 58 is the determined cDNA sequence for P60

[0109] SEQ ID NO: 59 is the determined cDNA sequence for P64

[0110] SEQ ID NO: 60 is the determined cDNA sequence for P65

[0111] SEQ ID NO: 61 is the determined cDNA sequence for P73

[0112] SEQ ID NO: 62 is the determined cDNA sequence for P75

[0113] SEQ ID NO: 63 is the determined cDNA sequence for P76

[0114] SEQ ID NO: 64 is the determined cDNA sequence for P79

[0115] SEQ ID NO: 65 is the determined cDNA sequence for P84

[0116] SEQ ID NO: 66 is the determined cDNA sequence for P68

[0117] SEQ ID NO: 67 is the determined cDNA sequence for P80 (also referred to as P704P)

[0118] SEQ ID NO: 68 is the determined cDNA sequence for P82

[0119] SEQ ID NO: 69 is the determined cDNA sequence for U1-3064

[0120] SEQ ID NO: 70 is the determined cDNA sequence for U1-3065

[0121] SEQ ID NO: 71 is the determined cDNA sequence for V1-3692

[0122] SEQ ID NO: 72 is the determined cDNA sequence for 1A-3905

[0123] SEQ ID NO: 73 is the determined cDNA sequence for V1-3686

[0124] SEQ ID NO: 74 is the determined cDNA sequence for R1-2330

[0125] SEQ ID NO: 75 is the determined cDNA sequence for 1B-3976

[0126] SEQ ID NO: 76 is the determined cDNA sequence for V1-3679

[0127] SEQ ID NO: 77 is the determined cDNA sequence for 1G-4736

[0128] SEQ ID NO: 78 is the determined cDNA sequence for 1G-4738

[0129] SEQ ID NO: 79 is the determined cDNA sequence for 1G-4741

[0130] SEQ ID NO: 80 is the determined cDNA sequence for 1G-4744

[0131] SEQ ID NO: 81 is the determined cDNA sequence for 1G-4734

[0132] SEQ ID NO: 82 is the determined cDNA sequence for 1H-4774

[0133] SEQ ID NO: 83 is the determined cDNA sequence for 1H-4781

[0134] SEQ ID NO: 84 is the determined cDNA sequence for 1H-4785

[0135] SEQ ID NO: 85 is the determined cDNA sequence for 1H-4787

[0136] SEQ ID NO: 86 is the determined cDNA sequence for 1H-4796

[0137] SEQ ID NO: 87 is the determined cDNA sequence for 1I-4807

[0138] SEQ ID NO: 88 is the determined cDNA sequence for 1I-4810

[0139] SEQ ID NO: 89 is the determined cDNA sequence for 1I-4811

[0140] SEQ ID NO: 90 is the determined cDNA sequence for 1J-4876

[0141] SEQ ID NO: 91 is the determined cDNA sequence for 1K-4884

[0142] SEQ ID NO: 92 is the determined cDNA sequence for 1K-4896

[0143] SEQ ID NO: 93 is the determined cDNA sequence for 1G-4761

[0144] SEQ ID NO: 94 is the determined cDNA sequence for 1G-4762

[0145] SEQ ID NO: 95 is the determined cDNA sequence for 1H-4766

[0146] SEQ ID NO: 96 is the determined cDNA sequence for 1H-4770

[0147] SEQ ID NO: 97 is the determined cDNA sequence for 1H-4771

[0148] SEQ ID NO: 98 is the determined cDNA sequence for 1H-4772

[0149] SEQ ID NO: 99 is the determined cDNA sequence for 1D-4297

[0150] SEQ ID NO: 100 is the determined cDNA sequence for 1D-4309

[0151] SEQ ID NO: 101 is the determined cDNA sequence for 1D.1-4278

[0152] SEQ ID NO: 102 is the determined cDNA sequence for 1D-4288

[0153] SEQ ID NO: 103 is the determined cDNA sequence for 1D-4283

[0154] SEQ ID NO: 104 is the determined cDNA sequence for 1D-4304

[0155] SEQ ID NO: 105 is the determined cDNA sequence for 1D-4296

[0156] SEQ ID NO: 106 is the determined cDNA sequence for 1D-4280

[0157] SEQ ID NO: 107 is the determined full length cDNA sequence for F1-12 (also referred to as P504S)

[0158] SEQ ID NO: 108 is the amino acid sequence for F1-12

[0159] SEQ ID NO: 109 is the determined full length cDNA sequence for J1-17

[0160] SEQ ID NO: 110 is the determined full length cDNA sequence for L1-12 (also referred to as P501S)

[0161] SEQ ID NO: 111 is the determined full length cDNA sequence for N1-1862 (also referred to as P503S)

[0162] SEQ ID NO: 112 is the amino acid sequence for J1-17

[0163] SEQ ID NO: 113 is the amino acid sequence for L1-12 (also referred to as P501S)

[0164] SEQ ID NO: 114 is the amino acid sequence for N1-1862 (also referred to as P503S)

[0165] SEQ ID NO: 115 is the determined cDNA sequence for P89

[0166] SEQ ID NO: 116 is the determined cDNA sequence for P90

[0167] SEQ ID NO: 117 is the determined cDNA sequence for P92

[0168] SEQ ID NO: 118 is the determined cDNA sequence for P95

[0169] SEQ ID NO: 119 is the determined cDNA sequence for P98

[0170] SEQ ID NO: 120 is the determined cDNA sequence for P102

[0171] SEQ ID NO: 121 is the determined cDNA sequence for P110

[0172] SEQ ID NO: 122 is the determined cDNA sequence for P111

[0173] SEQ ID NO: 123 is the determined cDNA sequence for P114

[0174] SEQ ID NO: 124 is the determined cDNA sequence for P115

[0175] SEQ ID NO: 125 is the determined cDNA sequence for P116

[0176] SEQ ID NO: 126 is the determined cDNA sequence for P124

[0177] SEQ ID NO: 127 is the determined cDNA sequence for P126

[0178] SEQ ID NO: 128 is the determined cDNA sequence for P130

[0179] SEQ ID NO: 129 is the determined cDNA sequence for P133

[0180] SEQ ID NO: 130 is the determined cDNA sequence for P138

[0181] SEQ ID NO: 131 is the determined cDNA sequence for P143

[0182] SEQ ID NO: 132 is the determined cDNA sequence for P151

[0183] SEQ ID NO: 133 is the determined cDNA sequence for P156

[0184] SEQ ID NO: 134 is the determined cDNA sequence for P157

[0185] SEQ ID NO: 135 is the determined cDNA sequence for P166

[0186] SEQ ID NO: 136 is the determined cDNA sequence for P176

[0187] SEQ ID NO: 137 is the determined cDNA sequence for P178

[0188] SEQ ID NO: 138 is the determined cDNA sequence for P179

[0189] SEQ ID NO: 139 is the determined cDNA sequence for P185

[0190] SEQ ID NO: 140 is the determined cDNA sequence for P192

[0191] SEQ ID NO: 141 is the determined cDNA sequence for P201

[0192] SEQ ID NO: 142 is the determined cDNA sequence for P204

[0193] SEQ ID NO: 143 is the determined cDNA sequence for P208

[0194] SEQ ID NO: 144 is the determined cDNA sequence for P211

[0195] SEQ ID NO: 145 is the determined cDNA sequence for P213

[0196] SEQ ID NO: 146 is the determined cDNA sequence for P219

[0197] SEQ ID NO: 147 is the determined cDNA sequence for P237

[0198] SEQ ID NO: 148 is the determined cDNA sequence for P239

[0199] SEQ ID NO: 149 is the determined cDNA sequence for P248

[0200] SEQ ID NO: 150 is the determined cDNA sequence for P251

[0201] SEQ ID NO: 151 is the determined cDNA sequence for P255

[0202] SEQ ID NO: 152 is the determined cDNA sequence for P256

[0203] SEQ ID NO: 153 is the determined cDNA sequence for P259

[0204] SEQ ID NO: 154 is the determined cDNA sequence for P260

[0205] SEQ ID NO: 155 is the determined cDNA sequence for P263

[0206] SEQ ID NO: 156 is the determined cDNA sequence for P264

[0207] SEQ ID NO: 157 is the determined cDNA sequence for P266

[0208] SEQ ID NO: 158 is the determined cDNA sequence for P270

[0209] SEQ ID NO: 159 is the determined cDNA sequence for P272

[0210] SEQ ID NO: 160 is the determined cDNA sequence for P278

[0211] SEQ ID NO: 161 is the determined cDNA sequence for P105

[0212] SEQ ID NO: 162 is the determined cDNA sequence for P107

[0213] SEQ ID NO: 163 is the determined cDNA sequence for P137

[0214] SEQ ID NO: 164 is the determined cDNA sequence for P194

[0215] SEQ ID NO: 165 is the determined cDNA sequence for P195

[0216] SEQ ID NO: 166 is the determined cDNA sequence for P196

[0217] SEQ ID NO: 167 is the determined cDNA sequence for P220

[0218] SEQ ID NO: 168 is the determined cDNA sequence for P234

[0219] SEQ ID NO: 169 is the determined cDNA sequence for P235

[0220] SEQ ID NO: 170 is the determined cDNA sequence for P243

[0221] SEQ ID NO: 171 is the determined cDNA sequence for P703P-DE1

[0222] SEQ ID NO: 172 is the amino acid sequence for P703P-DE1

[0223] SEQ ID NO: 173 is the determined cDNA sequence for P703P-DE2

[0224] SEQ ID NO: 174 is the determined cDNA sequence for P703P-DE6

[0225] SEQ ID NO: 175 is the determined cDNA sequence for P703P-DE13

[0226] SEQ ID NO: 176 is the amino acid sequence for P703P-DE13

[0227] SEQ ID NO: 177 is the determined cDNA sequence for P703P-DE14

[0228] SEQ ID NO: 178 is the amino acid sequence for P703P-DE14

[0229] SEQ ID NO: 179 is the determined extended cDNA sequence for 1G-4736

[0230] SEQ ID NO: 180 is the determined extended cDNA sequence for 1G-4738

[0231] SEQ ID NO: 181 is the determined extended cDNA sequence for 1G-4741

[0232] SEQ ID NO: 182 is the determined extended cDNA sequence for 1G-4744

[0233] SEQ ID NO: 183 is the determined extended cDNA sequence for 1H-4774

[0234] SEQ ID NO: 184 is the determined extended cDNA sequence for 1H-4781

[0235] SEQ ID NO: 185 is the determined extended cDNA sequence for 1H-4785

[0236] SEQ ID NO: 186 is the determined extended cDNA sequence for 1H-4787

[0237] SEQ ID NO: 187 is the determined extended cDNA sequence for 1H-4796

[0238] SEQ ID NO: 188 is the determined extended cDNA sequence for 1I-4807

[0239] SEQ ID NO: 189 is the determined 3′ cDNA sequence for 1I-4810

[0240] SEQ ID NO: 190 is the determined 3′ cDNA sequence for 1I-4811

[0241] SEQ ID NO: 191 is the determined extended cDNA sequence for 1J-4876

[0242] SEQ ID NO: 192 is the determined extended cDNA sequence for 1K-4884

[0243] SEQ ID NO: 193 is the determined extended cDNA sequence for 1K-4896

[0244] SEQ ID NO: 194 is the determined extended cDNA sequence for 1G-4761

[0245] SEQ ID NO: 195 is the determined extended cDNA sequence for 1G-4762

[0246] SEQ ID NO: 196 is the determined extended cDNA sequence for 1H-4766

[0247] SEQ ID NO: 197 is the determined 3′ cDNA sequence for 1H-4770

[0248] SEQ ID NO: 198 is the determined 3′ cDNA sequence for 1H -4771

[0249] SEQ ID NO: 199 is the determined extended cDNA sequence for 1H-4772

[0250] SEQ ID NO: 200 is the determined extended cDNA sequence for 1D-4309

[0251] SEQ ID NO: 201 is the determined extended cDNA sequence for 1D.1-4278

[0252] SEQ ID NO: 202 is the determined extended cDNA sequence for 1D-4288

[0253] SEQ ID NO: 203 is the determined extended cDNA sequence for 1D-4283

[0254] SEQ ID NO: 204 is the determined extended cDNA sequence for 1D-4304

[0255] SEQ ID NO: 205 is the determined extended cDNA sequence for 1D-4296

[0256] SEQ ID NO: 206 is the determined extended cDNA sequence for 1D-4280

[0257] SEQ ID NO: 207 is the determined cDNA sequence for 10-d8fwd

[0258] SEQ ID NO: 208 is the determined cDNA sequence for 10-H10con

[0259] SEQ ID NO: 209 is the determined cDNA sequence for 11-C8rev

[0260] SEQ ID NO: 210 is the determined cDNA sequence for 7. g6fwd

[0261] SEQ ID NO: 211 is the determined cDNA sequence for 7. g6rev

[0262] SEQ ID NO: 212 is the determined cDNA sequence for 8-b5fwd

[0263] SEQ ID NO: 213 is the determined cDNA sequence for 8-b5rev

[0264] SEQ ID NO: 214 is the determined cDNA sequence for 8-b6fwd

[0265] SEQ ID NO: 215 is the determined cDNA sequence for 8-b6rev

[0266] SEQ ID NO: 216 is the determined cDNA sequence for 8-d4fwd

[0267] SEQ ID NO: 217 is the determined cDNA sequence for 8-d9rev

[0268] SEQ ID NO: 218 is the determined cDNA sequence for 8-g3fwd

[0269] SEQ ID NO: 219 is the determined cDNA sequence for 8-g3rev

[0270] SEQ ID NO: 220 is the determined cDNA sequence for 8-h11rev

[0271] SEQ ID NO: 221 is the determined cDNA sequence for g-f12fwd

[0272] SEQ ID NO: 222 is the determined cDNA sequence for g-f3rev

[0273] SEQ ID NO: 223 is the determined cDNA sequence for P509S

[0274] SEQ ID NO: 224 is the determined cDNA sequence for P510S

[0275] SEQ ID NO: 225 is the determined cDNA sequence for P703DE5

[0276] SEQ ID NO: 226 is the determined cDNA sequence for 9-A11

[0277] SEQ ID NO: 227 is the determined cDNA sequence for 8-C6

[0278] SEQ ID NO: 228 is the determined cDNA sequence for 8-H7

[0279] SEQ ID NO: 229 is the determined cDNA sequence for JPTPN13

[0280] SEQ ID NO: 230 is the determined cDNA sequence for JPTPN14

[0281] SEQ ID NO: 231 is the determined cDNA sequence for JPTPN23

[0282] SEQ ID NO: 232 is the determined cDNA sequence for JPTPN24

[0283] SEQ ID NO: 233 is the determined cDNA sequence for JPTPN25

[0284] SEQ ID NO: 234 is the determined cDNA sequence for JPTPN30

[0285] SEQ ID NO: 235 is the determined cDNA sequence for JPTPN34

[0286] SEQ ID NO: 236 is the determined cDNA sequence for JPTPN35

[0287] SEQ ID NO: 237 is the determined cDNA sequence for JPTPN36

[0288] SEQ ID NO: 238 is the determined cDNA sequence for JPTPN38

[0289] SEQ ID NO: 239 is the determined cDNA sequence for JPTPN39

[0290] SEQ ID NO: 240 is the determined cDNA sequence for JPTPN40

[0291] SEQ ID NO: 241 is the determined cDNA sequence for JPTPN41

[0292] SEQ ID NO: 242 is the determined cDNA sequence for JPTPN42

[0293] SEQ ID NO: 243 is the determined cDNA sequence for JPTPN45

[0294] SEQ ID NO: 244 is the determined cDNA sequence for JPTPN46

[0295] SEQ ID NO: 245 is the determined cDNA sequence for JPTPN51

[0296] SEQ ID NO: 246 is the determined cDNA sequence for JPTPN56

[0297] SEQ ID NO: 247 is the determined cDNA sequence for JPTPN64

[0298] SEQ ID NO: 248 is the determined cDNA sequence for JPTPN65

[0299] SEQ ID NO: 249 is the determined cDNA sequence for JPTPN67

[0300] SEQ ID NO: 250 is the determined cDNA sequence for JPTPN76

[0301] SEQ ID NO: 251 is the determined cDNA sequence for JPTPN84

[0302] SEQ ID NO: 252 is the determined cDNA sequence for JPTPN85

[0303] SEQ ID NO: 253 is the determined cDNA sequence for JPTPN86

[0304] SEQ ID NO: 254 is the determined cDNA sequence for JPTPN87

[0305] SEQ ID NO: 255 is the determined cDNA sequence for JPTPN88

[0306] SEQ ID NO: 256 is the determined cDNA sequence for JP1F1

[0307] SEQ ID NO: 257 is the determined cDNA sequence for JP1F2

[0308] SEQ ID NO: 258 is the determined cDNA sequence for JP1C2

[0309] SEQ ID NO: 259 is the determined cDNA sequence for JP1B1

[0310] SEQ ID NO: 260 is the determined cDNA sequence for JP1B2

[0311] SEQ ID NO: 261 is the determined cDNA sequence for JP1D3

[0312] SEQ ID NO: 262 is the determined cDNA sequence for JP1A4

[0313] SEQ ID NO: 263 is the determined cDNA sequence for JP1F5

[0314] SEQ ID NO: 264 is the determined cDNA sequence for JP1E6

[0315] SEQ ID NO: 265 is the determined cDNA sequence for JP1D6

[0316] SEQ ID NO: 266 is the determined cDNA sequence for JP1B5

[0317] SEQ ID NO: 267 is the determined cDNA sequence for JP1A6

[0318] SEQ ID NO: 268 is the determined cDNA sequence for JP1E8

[0319] SEQ ID NO: 269 is the determined cDNA sequence for JP1D7

[0320] SEQ ID NO: 270 is the determined cDNA sequence for JP1D9

[0321] SEQ ID NO: 271 is the determined cDNA sequence for JP1C10

[0322] SEQ ID NO: 272 is the determined cDNA sequence for JP1A9

[0323] SEQ ID NO: 273 is the determined cDNA sequence for JP1F12

[0324] SEQ ID NO: 274 is the determined cDNA sequence for JP1E12

[0325] SEQ ID NO: 275 is the determined cDNA sequence for JP1D11

[0326] SEQ ID NO: 276 is the determined cDNA sequence for JP1C11

[0327] SEQ ID NO: 277 is the determined cDNA sequence for JP1C12

[0328] SEQ ID NO: 278 is the determined cDNA sequence for JP1B12

[0329] SEQ ID NO: 279 is the determined cDNA sequence for JP1A12

[0330] SEQ ID NO: 280 is the determined cDNA sequence for JP8G2

[0331] SEQ ID NO: 281 is the determined cDNA sequence for JP8H1

[0332] SEQ ID NO: 282 is the determined cDNA sequence for JP8H2

[0333] SEQ ID NO: 283 is the determined cDNA sequence for JP8A3

[0334] SEQ ID NO: 284 is the determined cDNA sequence for JP8A4

[0335] SEQ ID NO: 285 is the determined cDNA sequence for JP8C3

[0336] SEQ ID NO: 286 is the determined cDNA sequence for JP8G4

[0337] SEQ ID NO: 287 is the determined cDNA sequence for JP8B6

[0338] SEQ ID NO: 288 is the determined cDNA sequence for JP8D6

[0339] SEQ ID NO: 289 is the determined cDNA sequence for JP8F5

[0340] SEQ ID NO: 290 is the determined cDNA sequence for JP8A8

[0341] SEQ ID NO: 291 is the determined cDNA sequence for JP8C7

[0342] SEQ ID NO: 292 is the determined cDNA sequence for JP8D7

[0343] SEQ ID NO: 293 is the determined cDNA sequence for P8D8

[0344] SEQ ID NO: 294 is the determined cDNA sequence for JP8E7

[0345] SEQ ID NO: 295 is the determined cDNA sequence for JP8F8

[0346] SEQ ID NO: 296 is the determined cDNA sequence for JP8G8

[0347] SEQ ID NO: 297 is the determined cDNA sequence for JP8B10

[0348] SEQ ID NO: 298 is the determined cDNA sequence for JP8C10

[0349] SEQ ID NO: 299 is the determined cDNA sequence for JP8E9

[0350] SEQ ID NO: 300 is the determined cDNA sequence for JP8E10

[0351] SEQ ID NO: 301 is the determined cDNA sequence for JP8F9

[0352] SEQ ID NO: 302 is the determined cDNA sequence for JP8H9

[0353] SEQ ID NO: 303 is the determined cDNA sequence for JP8C12

[0354] SEQ ID NO: 304 is the determined cDNA sequence for JP8E11

[0355] SEQ ID NO: 305 is the determined cDNA sequence for JP8E12

[0356] SEQ ID NO: 306 is the amino acid sequence for the peptide PS2#12

[0357] SEQ ID NO: 307 is the determined cDNA sequence for P711P

[0358] SEQ ID NO: 308 is the determined cDNA sequence for P712P

[0359] SEQ ID NO: 309 is the determined cDNA sequence for CLONE23

[0360] SEQ ID NO: 310 is the determined cDNA sequence for P774P

[0361] SEQ ID NO: 311 is the determined cDNA sequence for P775P

[0362] SEQ ID NO: 312 is the determined cDNA sequence for P715P

[0363] SEQ ID NO: 313 is the determined cDNA sequence for P710P

[0364] SEQ ID NO: 314 is the determined cDNA sequence for P767P

[0365] SEQ ID NO: 315 is the determined cDNA sequence for P768P

[0366] SEQ ID NO: 316-325 are the determined cDNA sequences of previously isolated genes

[0367] SEQ ID NO: 326 is the determined cDNA sequence for P703PDE5

[0368] SEQ ID NO: 327 is the amino acid sequence for P703PDE5

[0369] SEQ ID NO: 328 is the determined cDNA sequence for P703P6.26

[0370] SEQ ID NO: 329 is the amino acid sequence for P703P6.26

[0371] SEQ ID NO: 330 is the determined cDNA sequence for P703PX-23

[0372] SEQ ID NO: 331 is the amino acid sequence for P703PX-23

[0373] SEQ ID NO: 332 is the determined full length cDNA sequence for P509S

[0374] SEQ ID NO: 333 is the determined extended cDNA sequence for P707P (also referred to as 11-C9)

[0375] SEQ ID NO: 334 is the determined cDNA sequence for P714P

[0376] SEQ ID NO: 335 is the determined cDNA sequence for P705P (also referred to as 9-F3)

[0377] SEQ ID NO: 336 is the amino acid sequence for P705P

[0378] SEQ ID NO: 337 is the amino acid sequence of the peptide P1S#10

[0379] SEQ ID NO: 338 is the amino acid sequence of the peptide p5

[0380] SEQ ID NO: 339 is the amino acid sequence of P509S

[0381] SEQ ID NO: 340 is the determined cDNA sequence for P778P

[0382] SEQ ID NO: 341 is the determined cDNA sequence for P786P

[0383] SEQ ID NO: 342 is the determined cDNA sequence for P789P

[0384] SEQ ID NO: 343 is the determined cDNA sequence for a clone showing homology to Homo sapiens MM46 mRNA

[0385] SEQ ID NO: 344 is the determined cDNA sequence for a clone showing homology to Homo sapiens TNF-alpha stimulated ABC protein (ABC50) mRNA

[0386] SEQ ID NO: 345 is the determined cDNA sequence for a clone showing homology to Homo sapiens mRNA for E-cadherin

[0387] SEQ ID NO: 346 is the determined cDNA sequence for a clone showing homology to Human nuclear-encoded mitochondrial serine hydroxymethyltransferase (SHMT)

[0388] SEQ ID NO: 347 is the determined cDNA sequence for a clone showing homology to Homo sapiens natural resistance-associated macrophage protein2 (NRAMP2)

[0389] SEQ ID NO: 348 is the determined cDNA sequence for a clone showing homology to Homo sapiens phosphoglucomutase-related protein (PGMRP)

[0390] SEQ ID NO: 349 is the determined cDNA sequence for a clone showing homology to Human mRNA for proteosome subunit p40

[0391] SEQ ID NO: 350 is the determined cDNA sequence for P777P

[0392] SEQ ID NO: 351 is the determined cDNA sequence for P779P

[0393] SEQ ID NO: 352 is the determined cDNA sequence for P790P

[0394] SEQ ID NO: 353 is the determined cDNA sequence for P784P

[0395] SEQ ID NO: 354 is the determined cDNA sequence for P776P

[0396] SEQ ID NO: 355 is the determined cDNA sequence for P780P

[0397] SEQ ID NO: 356 is the determined cDNA sequence for P544S

[0398] SEQ ID NO: 357 is the determined cDNA sequence for P745S

[0399] SEQ ID NO: 358 is the determined cDNA sequence for P782P

[0400] SEQ ID NO: 359 is the determined cDNA sequence for P783P

[0401] SEQ ID NO: 360 is the determined cDNA sequence for unknown 17984

[0402] SEQ ID NO: 361 is the determined cDNA sequence for P787P

[0403] SEQ ID NO: 362 is the determined cDNA sequence for P788P

[0404] SEQ ID NO: 363 is the determined cDNA sequence for unknown 17994

[0405] SEQ ID NO: 364 is the determined cDNA sequence for P781P

[0406] SEQ ID NO: 365 is the determined cDNA sequence for P785P

[0407] SEQ ID NO: 366-375 are the determined cDNA sequences for splice variants of B305D.

[0408] SEQ ID NO: 376 is the amino acid sequence encoded by the sequence of SEQ ID NO: 366.

[0409] SEQ ID NO: 377 is the amino acid sequence encoded by the sequence of SEQ ID NO: 372.

[0410] SEQ ID NO: 378 is the amino acid sequence encoded by the sequence of SEQ ID NO: 373.

[0411] SEQ ID NO: 379 is the amino acid sequence encoded by the sequence of SEQ ID NO: 374.

[0412] SEQ ID NO: 380 is the amino acid sequence encoded by the sequence of SEQ ID NO: 375.

[0413] SEQ ID NO: 381 is the determined cDNA sequence for B716P.

[0414] SEQ ID NO: 382 is the determined full-length cDNA sequence for P711P.

[0415] SEQ ID NO: 383 is the amino acid sequence for P711P.

[0416] SEQ ID NO: 384 is the cDNA sequence for P1000C.

[0417] SEQ ID NO: 385 is the cDNA sequence for CGI-82.

[0418] SEQ ID NO: 386 is the cDNA sequence for 23320.

[0419] SEQ ID NO: 387 is the cDNA sequence for CGI-69.

[0420] SEQ ID NO: 388 is the cDNA sequence for L-iditol-2-dehydrogenase.

[0421] SEQ ID NO: 389 is the cDNA sequence for 23379.

[0422] SEQ ID NO: 390 is the cDNA sequence for 23381.

[0423] SEQ ID NO: 391 is the cDNA sequence for KIAA0122.

[0424] SEQ ID NO: 392 is the cDNA sequence for clone 23399 (also known as P554S).

[0425] SEQ ID NO: 393 is the cDNA sequence for a previously identified gene.

[0426] SEQ ID NO: 394 is the cDNA sequence for HCLBP.

[0427] SEQ ID NO: 395 is the cDNA sequence for transglutaminase.

[0428] SEQ ID NO: 396 is the cDNA sequence for a previously identified gene.

[0429] SEQ ID NO: 397 is the cDNA sequence for PAP.

[0430] SEQ ID NO: 398 is the cDNA sequence for Ets transcription factor PDEF.

[0431] SEQ ID NO: 399 is the cDNA sequence for hTGR.

[0432] SEQ ID NO: 400 is the cDNA sequence for KIAA0295.

[0433] SEQ ID NO: 401 is the cDNA sequence for 22545.

[0434] SEQ ID NO: 402 is the cDNA sequence for 22547.

[0435] SEQ ID NO: 403 is the cDNA sequence for 22548.

[0436] SEQ ID NO: 404 is the cDNA sequence for 22550.

[0437] SEQ ID NO: 405 is the cDNA sequence for 22551.

[0438] SEQ ID NO: 406 is the cDNA sequence for 22552.

[0439] SEQ ID NO: 407 is the cDNA sequence for 22553 (also known as P1020C).

[0440] SEQ ID NO: 408 is the cDNA sequence for 22558.

[0441] SEQ ID NO: 409 is the cDNA sequence for 22562.

[0442] SEQ ID NO: 410 is the cDNA sequence for 22565.

[0443] SEQ ID NO: 411 is the cDNA sequence for 22567.

[0444] SEQ ID NO: 412 is the cDNA sequence for 22568.

[0445] SEQ ID NO: 413 is the cDNA sequence for 22570.

[0446] SEQ ID NO: 414 is the cDNA sequence for 22571.

[0447] SEQ ID NO: 415 is the cDNA sequence for 22572.

[0448] SEQ ID NO: 416 is the cDNA sequence for 22573.

[0449] SEQ ID NO: 417 is the cDNA sequence for 22573.

[0450] SEQ ID NO: 418 is the cDNA sequence for 22575.

[0451] SEQ ID NO: 419 is the cDNA sequence for 22580.

[0452] SEQ ID NO: 420 is the cDNA sequence for 22581.

[0453] SEQ ID NO: 421 is the cDNA sequence for 22582.

[0454] SEQ ID NO: 422 is the cDNA sequence for 22583.

[0455] SEQ ID NO: 423 is the cDNA sequence for 22584.

[0456] SEQ ID NO: 424 is the cDNA sequence for 22585.

[0457] SEQ ID NO: 425 is the cDNA sequence for 22586.

[0458] SEQ ID NO: 426 is the cDNA sequence for 22587.

[0459] SEQ ID NO: 427 is the cDNA sequence for 22588.

[0460] SEQ ID NO: 428 is the cDNA sequence for 22589.

[0461] SEQ ID NO: 429 is the cDNA sequence for 22590.

[0462] SEQ ID NO: 430 is the cDNA sequence for 22591.

[0463] SEQ ID NO: 431 is the cDNA sequence for 22592.

[0464] SEQ ID NO: 432 is the cDNA sequence for 22593.

[0465] SEQ ID NO: 433 is the cDNA sequence for 22594.

[0466] SEQ ID NO: 434 is the cDNA sequence for 22595.

[0467] SEQ ID NO: 435 is the cDNA sequence for 22596.

[0468] SEQ ID NO: 436 is the cDNA sequence for 22847.

[0469] SEQ ID NO: 437 is the cDNA sequence for 22848.

[0470] SEQ ID NO: 438 is the cDNA sequence for 22849.

[0471] SEQ ID NO: 439 is the cDNA sequence for 22851.

[0472] SEQ ID NO: 440 is the cDNA sequence for 22852.

[0473] SEQ ID NO: 441 is the cDNA sequence for 22853.

[0474] SEQ ID NO: 442 is the cDNA sequence for 22854.

[0475] SEQ ID NO: 443 is the cDNA sequence for 22855.

[0476] SEQ ID NO: 444 is the cDNA sequence for 22856.

[0477] SEQ ID NO: 445 is the cDNA sequence for 22857.

[0478] SEQ ID NO: 446 is the cDNA sequence for 23601.

[0479] SEQ ID NO: 447 is the cDNA sequence for 23602.

[0480] SEQ ID NO: 448 is the cDNA sequence for 23605.

[0481] SEQ ID NO: 449 is the cDNA sequence for 23606.

[0482] SEQ ID NO: 450 is the cDNA sequence for 23612.

[0483] SEQ ID NO: 451 is the cDNA sequence for 23614.

[0484] SEQ ID NO: 452 is the cDNA sequence for 23618.

[0485] SEQ ID NO: 453 is the cDNA sequence for 23622.

[0486] SEQ ID NO: 454 is the cDNA sequence for folate hydrolase.

[0487] SEQ ID NO: 455 is the cDNA sequence for LIM protein.

[0488] SEQ ID NO: 456 is the cDNA sequence for a known gene.

[0489] SEQ ID NO: 457 is the cDNA sequence for a known gene.

[0490] SEQ ID NO: 458 is the cDNA sequence for a previously identified gene.

[0491] SEQ ID NO: 459 is the cDNA sequence for 23045.

[0492] SEQ ID NO: 460 is the cDNA sequence for 23032.

[0493] SEQ ID NO: 461 is the cDNA sequence for clone 23054.

[0494] SEQ ID NO: 462-467 are cDNA sequences for known genes.

[0495] SEQ ID NO: 468-471 are cDNA sequences for P710P.

[0496] SEQ ID NO: 472 is a cDNA sequence for P1001C.

[0497] SEQ ID NO: 473 is the determined cDNA sequence for a first splice variant of P775P (referred to as 27505).

[0498] SEQ ID NO: 474 is the determined cDNA sequence for a second splice variant of P775P (referred to as 19947).

[0499] SEQ ID NO: 475 is the determined cDNA sequence for a third splice variant of P775P (referred to as 19941).

[0500] SEQ ID NO: 476 is the determined cDNA sequence for a fourth splice variant of P775P (referred to as 19937).

[0501] SEQ ID NO: 477 is a first amino acid sequence encoded by the sequence of SEQ ID NO: 474.

[0502] SEQ ID NO: 478 is a second amino acid sequence encoded by the sequence of SEQ ID NO: 474.

[0503] SEQ ID NO: 479 is the amino acid sequence encoded by the sequence of SEQ ID NO: 475.

[0504] SEQ ID NO: 480 is a first amino acid sequence encoded by the sequence of SEQ ID NO: 473.

[0505] SEQ ID NO: 481 is a second amino acid sequence encoded by the sequence of SEQ ID NO: 473.

[0506] SEQ ID NO: 482 is a third amino acid sequence encoded by the sequence of SEQ ID NO: 473.

[0507] SEQ ID NO: 483 is a fourth amino acid sequence encoded by the sequence of SEQ ID NO: 473.

[0508] SEQ ID NO: 484 is the first 30 amino acids of the M. tuberculosis antigen Ra12.

[0509] SEQ ID NO: 485 is the PCR primer AW025.

[0510] SEQ ID NO: 486 is the PCR primer AW003.

[0511] SEQ ID NO: 487 is the PCR primer AW027.

[0512] SEQ ID NO: 488 is the PCR primer AW026.

[0513] SEQ ID NO: 489-501 are peptides employed in epitope mapping studies.

[0514] SEQ ID NO: 502 is the determined cDNA sequence of the complementarity determining region for the anti-P503S monoclonal antibody 20D4.

[0515] SEQ ID NO: 503 is the determined cDNA sequence of the complementarity determining region for the anti-P503S monoclonal antibody JA1.

[0516] SEQ ID NO: 504 & 505 are peptides employed in epitope mapping studies.

[0517] SEQ ID NO: 506 is the determined cDNA sequence of the complementarity determining region for the anti-P703P monoclonal antibody 8H2.

[0518] SEQ ID NO: 507 is the determined cDNA sequence of the complementarity determining region for the anti-P703P monoclonal antibody 7H8.

[0519] SEQ ID NO: 508 is the determined cDNA sequence of the complementarity determining region for the anti-P703P monoclonal antibody 2D4.

[0520] SEQ ID NO: 509-522 are peptides employed in epitope mapping studies.

[0521] SEQ ID NO: 523 is a mature form of P703P used to raise antibodies against P703P.

[0522] SEQ ID NO: 524 is the putative full-length cDNA sequence of P703P.

[0523] SEQ ID NO: 525 is the amino acid sequence encoded by SEQ ID NO: 524.

[0524] SEQ ID NO: 526 is the full-length cDNA sequence for P790P.

[0525] SEQ ID NO: 527 is the amino acid sequence for P790P.

[0526] SEQ ID NO: 528 & 529 are PCR primers.

[0527] SEQ ID NO: 530 is the cDNA sequence of a splice variant of SEQ ID NO: 366.

[0528] SEQ ID NO: 531 is the cDNA sequence of the open reading frame of SEQ ID NO: 530.

[0529] SEQ ID NO: 532 is the amino acid encoded by the sequence of SEQ ID NO: 531.

[0530] SEQ ID NO: 533 is the DNA sequence of a putative ORF of P775P.

[0531] SEQ ID NO: 534 is the amino acid sequence encoded by SEQ ID NO: 533.

[0532] SEQ ID NO: 535 is a first full-length cDNA sequence for P510S.

[0533] SEQ ID NO: 536 is a second full-length cDNA sequence for P510S.

[0534] SEQ ID NO: 537 is the amino acid sequence encoded by SEQ ID NO: 535.

[0535] SEQ ID NO: 538 is the amino acid sequence encoded by SEQ ID NO: 536.

[0536] SEQ ID NO: 539 is the peptide P501S-370.

[0537] SEQ ID NO: 540 is the peptide P501S-376.

[0538] SEQ ID NO: 541-551 are epitopes of P501S.

[0539] SEQ ID NO: 552 is an extended cDNA sequence for P712P.

[0540] SEQ ID NO: 553-568 are the amino acid sequences encoded by open reading frames within SEQ ID NO: 552.

[0541] SEQ ID NO: 569 is an extended cDNA sequence for P776P.

[0542] SEQ ID NO: 570 is the determined cDNA sequence for a splice variant of P776P referred to as contig 6.

[0543] SEQ ID NO: 571 is the determined cDNA sequence for a splice variant of P776P referred to as contig 7.

[0544] SEQ ID NO: 572 is the determined cDNA sequence for a splice variant of P776P referred to as contig 14.

[0545] SEQ ID NO: 573 is the amino acid sequence encoded by a first ORF of SEQ ID NO: 570.

[0546] SEQ ID NO: 574 is the amino acid sequence encoded by a second ORF of

[0547] SEQ ID NO: 570.

[0548] SEQ ID NO: 575 is the amino acid sequence encoded by a ORF of SEQ ID NO: 571.

[0549] SEQ ID NO: 576-586 are amino acid sequences encoded by ORFs of SEQ ID NO: 569.

[0550] SEQ ID NO: 587 is a DNA consensus sequence of the sequences of P767P and P777P.

[0551] SEQ ID NO: 588-590 are amino acid sequences encoded by ORFs of SEQ ID NO: 587.

[0552] SEQ ID NO: 591 is an extended cDNA sequence for P1020C.

[0553] SEQ ID NO: 592 is the amino acid sequence encoded by the sequence of SEQ ID NO: P1020C.

[0554] SEQ ID NO: 593 is a splice variant of P775P referred to as 50748.

[0555] SEQ ID NO: 594 is a splice variant of P775P referred to as 50717. SEQ ID NO: 595 is a splice variant of P775P referred to as 45985.

[0556] SEQ ID NO: 596 is a splice variant of P775P referred to as 38769.

[0557] SEQ ID NO: 597 is a splice variant of P775P referred to as 37922.

[0558] SEQ ID NO: 598 is a splice variant of P510S referred to as 49274.

[0559] SEQ ID NO: 599 is a splice variant of P510S referred to as 39487.

[0560] SEQ ID NO: 600 is a splice variant of P504S referred to as 5167.16.

[0561] SEQ ID NO: 601 is a splice variant of P504S referred to as 5167.1.

[0562] SEQ ID NO: 602 is a splice variant of P504S referred to as 5163.46.

[0563] SEQ ID NO: 603 is a splice variant of P504S referred to as 5163.42.

[0564] SEQ ID NO: 604 is a splice variant of P504S referred to as 5163.34.

[0565] SEQ ID NO: 605 is a splice variant of P504S referred to as 5163.17.

[0566] SEQ ID NO: 606 is a splice variant of P501S referred to as 10640.

[0567] SEQ ID NO: 607-615 are the sequences of PCR primers.

[0568] SEQ ID NO: 616 is the determined cDNA sequence of a fusion of P703P and PSA.

[0569] SEQ ID NO: 617 is the amino acid sequence of the fusion of P703P and PSA.

[0570] SEQ ID NO: 618-689 are determined cDNA sequences of prostate-specific clones.

[0571] SEQ ID NO: 690 is the cDNA sequence of the gene DD3.

[0572] SEQ ID NO: 691-697 are determined cDNA sequences of prostate-specific clones.

[0573] SEQ ID NO: 698 is an extended cDNA sequence for P714P.

[0574] SEQ ID NO: 699-701 are the cDNA sequences for splice variants of P704P.

[0575] SEQ ID NO: 702 is the cDNA sequence of a spliced variant of P553S referred to as P553S-14.

[0576] SEQ ID NO: 703 is the cDNA sequence of a spliced variant of P553S referred to as P553S-12.

[0577] SEQ ID NO: 704 is the cDNA sequence of a spliced variant of P553S referred to as P5535-10.

[0578] SEQ ID NO: 705 is the cDNA sequence of a spliced variant of P553S referred to as P553S-6.

[0579] SEQ ID NO: 706 is the amino acid sequence encoded by SEQ ID NO: 705.

[0580] SEQ ID NO: 707 is the amino acid sequence encoded by SEQ ID NO: 702 SEQ ID NO: 708 is a second amino acid sequence encoded by SEQ ID NO: 702.

[0581] SEQ ID NO: 709-772 are determined cDNA sequences of prostate-specific clones.

[0582] SEQ ID NO: 773 is a first full-length cDNA sequence for prostate-specific transglutaminase gene (also referred to herein as P558S).

[0583] SEQ ID NO: 774 is a second full-length cDNA sequence for prostate-specific transglutaminase gene.

[0584] SEQ ID NO: 775 is the amino acid sequence encoded by the sequence of

[0585] SEQ ID NO: 773.

[0586] SEQ ID NO: 776 is the amino acid sequence encoded by the sequence of

[0587] SEQ ID NO: 774.

[0588] SEQ ID NO: 777 is the full-length cDNA sequence for P788P.

[0589] SEQ ID NO: 778 is the amino acid sequence encoded by SEQ ID NO: 777.

[0590] SEQ ID NO: 779 is the determined cDNA sequence for a polymorphic variant of P788P.

[0591] SEQ ID NO: 780 is the amino acid sequence encoded by SEQ ID NO: 779.

[0592] SEQ ID NO: 781 is the amino acid sequence of peptide 4 from P703P.

[0593] SEQ ID NO: 782 is the cDNA sequence that encodes peptide 4 from P703P.

[0594] SEQ ID NO: 783-798 are the cDNA sequence encoding epitopes of P703P.

[0595] SEQ ID NO: 799-814 are the amino acid sequences of epitopes of P703P.

[0596] SEQ ID NO: 815 and 816 are PCR primers.

[0597] SEQ ID NO: 817 is the cDNA sequence encoding an N-terminal portion of P788P expressed in E. coli.

[0598] SEQ ID NO: 818 is the amino acid sequence of the N-terminal portion of P788P expressed in E. coli.

[0599] SEQ ID NO: 819 is the amino acid sequence of the M. tuberculosis antigen Ra12.

[0600] SEQ ID NO: 820 and 821 are PCR primers.

[0601] SEQ ID NO: 822 is the cDNA sequence for the Ra12-P510S-C construct.

[0602] SEQ ID NO: 823 is the cDNA sequence for the P510S-C construct.

[0603] SEQ ID NO: 824 is the cDNA sequence for the P510S-E3 construct.

[0604] SEQ ID NO: 825 is the amino acid sequence for the Ra12-P510S-C construct.

[0605] SEQ ID NO: 826 is the amino acid sequence for the P510S-C construct.

[0606] SEQ ID NO: 827 is the amino acid sequence for the P510S-E3 construct.

[0607] SEQ ID NO: 828-833 are PCR primers.

[0608] SEQ ID NO: 834 is the cDNA sequence of the construct Ra12-P775P-ORF3.

[0609] SEQ ID NO: 835 is the amino acid sequence of the construct Ra12-P775P-ORF3.

[0610] SEQ ID NO: 836 and 837 are PCR primers.

[0611] SEQ ID NO: 838 is the determined amino acid sequence for a P703P His tag fusion protein.

[0612] SEQ ID NO: 839 is the determined cDNA sequence for a P703P His tag fusion protein.

[0613] SEQ ID NO: 840 and 841 are PCR primers.

[0614] SEQ ID NO: 842 is the determined amino acid sequence for a P705P His tag fusion protein.

[0615] SEQ ID NO: 843 is the determined cDNA sequence for a P705P His tag fusion protein.

[0616] SEQ ID NO: 844 and 845 are PCR primers.

[0617] SEQ ID NO: 846 is the determined amino acid sequence for a P711P His tag fusion protein.

[0618] SEQ ID NO: 847 is the determined cDNA sequence for a P711P His tag fusion protein.

[0619] SEQ ID NO: 848 is the amino acid sequence of the M. tuberculosis antigen Ra12.

[0620] SEQ ID NO: 849 and 850 are PCR primers.

[0621] SEQ ID NO: 851 is the determined cDNA sequence for the construct Ra12-P501S-E2.

[0622] SEQ ID NO: 852 is the determined amino acid sequence for the construct Ra12-P501S-E2.

[0623] SEQ ID NO: 853 is the amino acid sequence for an epitope of P501S.

[0624] SEQ ID NO: 854 is the DNA sequence encoding SEQ ID NO: 853.

[0625] SEQ ID NO: 855 is the amino acid sequence for an epitope of P501S.

[0626] SEQ ID NO: 856 is the DNA sequence encoding SEQ ID NO: 855.

[0627] SEQ ID NO: 857 is a peptide employed in epitope mapping studies.

[0628] SEQ ID NO: 858 is the amino acid sequence for an epitope of P501S.

[0629] SEQ ID NO: 859 is the DNA sequence encoding SEQ ID NO: 858.

[0630] SEQ ID NO: 860-862 are the amino acid sequences for CD4 epitopes of P501S.

[0631] SEQ ID NO: 863-865 are the DNA sequences encoding the sequences of SEQ ID NO: 860-862.

[0632] SEQ ID NO: 866-877 are the amino acid sequences for putative CTL epitopes of P703P.

[0633] SEQ ID NO: 878 is the full-length cDNA sequence for P789P.

[0634] SEQ ID NO: 879 is the amino acid sequence encoded by SEQ ID NO: 878.

[0635] SEQ ID NO: 880 is the determined full-length cDNA sequence for the splice variant of P776P referred to as contig 6.

[0636] SEQ ID NO: 881-882 are determined full-length cDNA sequences for the splice variant of P776P referred to as contig 7.

[0637] SEQ ID NO: 883-887 are amino acid sequences encoded by SEQ ID NO: 880.

[0638] SEQ ID NO: 888-893 are amino acid sequences encoded by the splice variant of P776P referred to as contig 7.

[0639] SEQ ID NO: 894 is the full-length cDNA sequence for human transmembrane protease serine 2.

[0640] SEQ ID NO: 895 is the amino acid sequence encoded by SEQ ID NO: 894.

[0641] SEQ ID NO: 896 is the cDNA sequence encoding the first 209 amino acids of human transmembrane protease serine 2.

[0642] SEQ ID NO: 897 is the first 209 amino acids of human transmembrane protease serine 2.

[0643] SEQ ID NO: 898 is the amino acid sequence of peptide 296-322 of P501S.

[0644] SEQ ID NO: 899-902 are PCR primers.

[0645] SEQ ID NO: 903 is the determined cDNA sequence of the Vb chain of a T cell receptor for the P501S-specific T cell clone 4E5.

[0646] SEQ ID NO: 904 is the determined cDNA sequence of the Va chain of a T cell receptor for the P501S-specific T cell clone 4E5.

[0647] SEQ ID NO: 905 is the amino acid sequence encoded by SEQ ID NO 903.

[0648] SEQ ID NO: 906 is the amino acid sequence encoded by SEQ ID NO 904.

[0649] SEQ ID NO: 907 is the full-length open reading frame for P768P including stop codon.

[0650] SEQ ID NO: 908 is the full-length open reading frame for P768P without stop codon.

[0651] SEQ ID NO: 909 is the amino acid sequence encoded by SEQ ID NO: 908.

[0652] SEQ ID NO: 910-915 are the amino acid sequences for predicted domains of P768P.

[0653] SEQ ID NO: 916 is the full-length cDNA sequence of P835P.

[0654] SEQ ID NO: 917 is the cDNA sequence of the previously identified clone FLJ13581.

[0655] SEQ ID NO: 918 is the cDNA sequence of the open reading frame for P835P with stop codon.

[0656] SEQ ID NO: 919 is the cDNA sequence of the open reading frame for P835P without stop codon.

[0657] SEQ ID NO: 920 is the full-length amino acid sequence for P835P.

[0658] SEQ ID NO: 921-928 are the amino acid sequences of extracellular and intracellular domains of P835P.

[0659] SEQ ID NO: 929 is the full-length cDNA sequence for P1000C.

[0660] SEQ ID NO: 930 is the cDNA sequence of the open reading frame for P1000C, including stop codon.

[0661] SEQ ID NO: 931 is the cDNA sequence of the open reading frame for P1000C, without stop codon.

[0662] SEQ ID NO: 932 is the full-length amino acid sequence for P1000C.

[0663] SEQ ID NO: 933 is amino acids 1-100 of SEQ ID NO: 932.

[0664] SEQ ID NO: 934 is amino acids 100-492 of SEQ ID NO: 932.

[0665] SEQ ID NO: 935-937 are PCR primers.

[0666] SEQ ID NO: 938 is the cDNA sequence of the expressed full-length P767P coding region.

[0667] SEQ ID NO: 939 is the cDNA sequence of an expressed truncated P767P coding region.

[0668] SEQ ID NO: 940 is the amino acid sequence encoded by SEQ ID NO: 939.

[0669] SEQ ID NO: 941 is the amino acid sequence encoded by SEQ ID NO: 938.

[0670] SEQ ID NO: 942 is the DNA sequence of a CD4 epitope of P703P.

[0671] SEQ ID NO: 943 is the amino acid sequence of a CD4 epitope of P703P.

[0672] SEQ ID NO: 944 and 945 are the cDNA sequences of two alternative splice forms of P780P.

[0673] SEQ ID NO: 946 and 947 are the amino acid sequences encoded by SEQ ID NO: 944 and 945, respectively.

[0674] SEQ ID NO: 948 is a corrected cDNA sequence for P705P.

[0675] SEQ ID NO: 949-956 are the amino acid sequences of P790P peptides.

[0676] SEQ ID NO: 957-966 are the amino acid sequences of P775P peptides.

[0677] SEQ ID NO: 967 is an extended cDNA sequence for P554S.

[0678] SEQ ID NO: 968 is the amino acid sequence for P554S.

[0679] SEQ ID NO: 969-976 are the cDNA sequences encoding epitopes of P501S.

[0680] SEQ ID NO: 977-984 are the amino acid sequences of epitopes of P501S.

[0681] SEQ ID NO: 985-987 are amino acid sequences of peptides of P501S.

[0682] SEQ ID NO: 988-990 are amino acid sequences of peptides of P703P.

### DETAILED DESCRIPTION OF THE INVENTION

[0683] The present invention is directed generally to compositions and their use in the therapy and diagnosis of cancer, particularly prostate cancer. As described further below, illustrative compositions of the present invention include, but are not restricted to, polypeptides, particularly immunogenic polypeptides, polynucleotides encoding such polypeptides, antibodies and other binding agents, antigen presenting cells (APCs) and immune system cells (e.g., T cells).

[0684] The practice of the present invention will employ, unless indicated specifically to the contrary, conventional methods of virology, immunology, microbiology, molecular biology and recombinant DNA techniques within the skill of the art, many of which are described below for the purpose of illustration. Such techniques are explained fully in the literature. See, e.g., Sambrook, et al. Molecular Cloning: A Laboratory Manual (2nd Edition, 1989); Maniatis et al. Molecular Cloning: A Laboratory Manual (1982); DNA Cloning: A Practical Approach, vol. I & II (D. Glover, ed.); Oligonucleotide Synthesis (N. Gait, ed., 1984); Nucleic Acid Hybridization (B. Hames & S. Higgins, eds., 1985); Transcription and Translation (B. Hames & S. Higgins, eds., 1984); Animal Cell Culture (R. Freshney, ed., 1986); Perbal, A Practical Guide to Molecular Cloning (1984).

[0685] All publications, patents and patent applications cited herein, whether supra or infra, are hereby incorporated by reference in their entirety.

[0686] As used in this specification and the appended claims, the singular forms “a,” “an” and “the” include plural references unless the content clearly dictates otherwise.

[0687] Polypeptide Compositions

[0688] As used herein, the term “polypeptide” “is used in its conventional meaning, i.e., as a sequence of amino acids. The polypeptides are not limited to a specific length of the product; thus, peptides, oligopeptides, and proteins are included within the definition of polypeptide, and such terms may be used interchangeably herein unless specifically indicated otherwise. This term also does not refer to or exclude post-expression modifications of the polypeptide, for example, glycosylations, acetylations, phosphorylations and the like, as well as other modifications known in the art, both naturally occurring and non-naturally occurring. A polypeptide may be an entire protein, or a subsequence thereof. Particular polypeptides of interest in the context of this invention are amino acid subsequences comprising epitopes, i.e., antigenic determinants substantially responsible for the immunogenic properties of a polypeptide and being capable of evoking an immune response.

[0689] Particularly illustrative polypeptides of the present invention comprise those encoded by a polynucleotide sequence set forth in any one of SEQ ID NOs: 1-111, 115-171, 173-175, 177, 179-305, 307-315, 326, 328, 330, 332-335, 340-375, 381, 382 and 384-476, 524, 526, 530, 531, 533, 535, 536, 552, 569-572, 587, 591, 593-606, 618-705, 709-774, 777, 789, 817, 823, 824, 878, 880-882, 894, 896, 907, 908, 916-919, 929-931, 938, 939, 942, 944, 945, 948, 967 and 969-976, or a sequence that hybridizes under moderately stringent conditions, or, alternatively, under highly stringent conditions, to a polynucleotide sequence set forth in any one of SEQ ID NOs: 1-111, 115-171, 173-175, 177, 179-305, 307-315, 326, 328, 330, 332-335, 340-375, 381, 382 and 384-476, 524, 526, 530, 531, 533, 535, 536, 552, 569-572, 587, 591, 593-606, 618-705, 709-774, 777, 789, 817, 823, 824, 878, 880-882, 894, 896, 907, 908, 916-919, 929-931, 938, 939, 942, 944, 945, 948, 967 and 969-976. In specific embodiments, the polypeptides of the invention comprise amino acid sequences as set forth in any one of SEQ ID NO: 112-114, 172, 176, 178, 327, 329, 331, 336, 339, 376-380, 383, 477-483, 496, 504, 505, 519, 520, 522, 525, 527, 532, 534, 537-551, 553-568, 573-586, 588-590, 592, 706-708, 775, 776, 778, 780, 781, 811, 814, 818, 826, 827, 853, 855, 858, 860-862, 866-877, 879, 883-893, 895, 897, 898, 909-915, 920-928, 932-934, 940, 941, 943, 946, 947, 949-966, 968 and 977-990.

[0690] The polypeptides of the present invention are sometimes herein referred to as prostate-specific proteins or prostate-specific polypeptides, as an indication that their identification has been based at least in part upon their increased levels of expression in prostate tissue samples. Thus, a “prostate-specific polypeptide” or “prostate-specific protein,” refers generally to a polypeptide sequence of the present invention, or a polynucleotide sequence encoding such a polypeptide, that is expressed in a substantial proportion of prostate tissue samples, for example preferably greater than about 20%, more preferably greater than about 30%, and most preferably greater than about 50% or more of prostate tissue samples tested, at a level that is at least two fold, and preferably at least five fold, greater than the level of expression in other normal tissues, as determined using a representative assay provided herein. A prostate-specific polypeptide sequence of the invention, based upon its increased level of expression in tumor cells, has particular utility both as a diagnostic marker as well as a therapeutic target, as further described below.

[0691] In certain preferred embodiments, the polypeptides of the invention are immunogenic, i.e., they react detectably within an immunoassay (such as an ELISA or T-cell stimulation assay) with antisera and/or T-cells from a patient with prostate cancer. Screening for immunogenic activity can be performed using techniques well known to the skilled artisan. For example, such screens can be performed using methods such as those described in Harlow and Lane, Antibodies: A Laboratory Manual, Cold Spring Harbor Laboratory, 1988. In one illustrative example, a polypeptide may be immobilized on a solid support and contacted with patient sera to allow binding of antibodies within the sera to the immobilized polypeptide. Unbound sera may then be removed and bound antibodies detected using, for example, ¹²⁵I-labeled Protein A.

[0692] As would be recognized by the skilled artisan, immunogenic portions of the polypeptides disclosed herein are also encompassed by the present invention. An “immunogenic portion,” as used herein, is a fragment of an immunogenic polypeptide of the invention that itself is immunologically reactive (i.e., specifically binds) with the B-cells and/or T-cell surface antigen receptors that recognize the polypeptide. Immunogenic portions may generally be identified using well known techniques, such as those summarized in Paul, Fundamental Immunology, 3rd ed., 243-247 (Raven Press, 1993) and references cited therein. Such techniques include screening polypeptides for the ability to react with antigen-specific antibodies, antisera and/or T-cell lines or clones. As used herein, antisera and antibodies are “antigen-specific” if they specifically bind to an antigen (i.e., they react with the protein in an ELISA or other immunoassay, and do not react detectably with unrelated proteins). Such antisera and antibodies may be prepared as described herein, and using well-known techniques.

[0693] In one preferred embodiment, an immunogenic portion of a polypeptide of the present invention is a portion that reacts with antisera and/or T-cells at a level that is not substantially less than the reactivity of the full-length polypeptide (e.g., in an ELISA and/or T-cell reactivity assay). Preferably, the level of immunogenic activity of the immunogenic portion is at least about 50%, preferably at least about 70% and most preferably greater than about 90% of the immunogenicity for the full-length polypeptide. In some instances, preferred immunogenic portions will be identified that have a level of immunogenic activity greater than that of the corresponding full-length polypeptide, e.g., having greater than about 100% or 150% or more immunogenic activity.

[0694] In certain other embodiments, illustrative immunogenic portions may include peptides in which an N-terminal leader sequence and/or transmembrane domain has been deleted. Other illustrative immunogenic portions will contain a small N- and/or C-terminal deletion (e.g., 1-30 amino acids, preferably 5-15 amino acids), relative to the mature protein.

[0695] In another embodiment, a polypeptide composition of the invention may also comprise one or more polypeptides that are immunologically reactive with T cells and/or antibodies generated against a polypeptide of the invention, particularly a polypeptide having an amino acid sequence disclosed herein, or to an immunogenic fragment or variant thereof.

[0696] In another embodiment of the invention, polypeptides are provided that comprise one or more polypeptides that are capable of eliciting T cells and/or antibodies that are immunologically reactive with one or more polypeptides described herein, or one or more polypeptides encoded by contiguous nucleic acid sequences contained in the polynucleotide sequences disclosed herein, or immunogenic fragments or variants thereof, or to one or more nucleic acid sequences which hybridize to one or more of these sequences under conditions of moderate to high stringency.

[0697] The present invention, in another aspect, provides polypeptide fragments comprising at least about 5, 10, 15, 20, 25, 50, or 100 contiguous amino acids, or more, including all intermediate lengths, of a polypeptide composition set forth herein, such as those set forth in SEQ ID NO: 112-114, 172, 176, 178, 327, 329, 331, 336, 339, 376-380, 383, 477-483, 496, 504, 505, 519, 520, 522, 525, 527, 532, 534, 537-551, 553-568, 573-586, 588-590, 592, 706-708, 775, 776, 778, 780, 781, 811, 814, 818, 826, 827, 853, 855, 858, 860-862, 866-877, 879, 883-893, 895, 897, 898, 909-915, 920-928, 932-934, 940, 941, 943, 946, 947, 949-966, 968 and 977-990, or those encoded by a polynucleotide sequence set forth in a sequence of SEQ ID NO: 1-111, 115-171, 173-175, 177, 179-305, 307-315, 326, 328, 330, 332-335, 340-375, 381, 382 and 384-476, 524, 526, 530, 531, 533, 535, 536, 552, 569-572, 587, 591, 593-606, 618-705, 709-774, 777, 789, 817, 823, 824, 878, 880-882, 894, 896, 907, 908, 916-919, 929-931, 938, 939, 942, 944, 945, 948, 967 and 969-976.

[0698] In another aspect, the present invention provides variants of the polypeptide compositions described herein. Polypeptide variants generally encompassed by the present invention will typically exhibit at least about 70%, 75%, 80%, 85%, 90%, 91%, 92%, 93%, 94%, 95%, 96%, 97%, 98%, or 99% or more identity (determined as described below), along its length, to a polypeptide sequence set forth herein.

[0699] In one preferred embodiment, the polypeptide fragments and variants provided by the present invention are immunologically reactive with an antibody and/or T-cell that reacts with a full-length polypeptide specifically set forth herein.

[0700] In another preferred embodiment, the polypeptide fragments and variants provided by the present invention exhibit a level of immunogenic activity of at least about 50%, preferably at least about 70%, and most preferably at least about 90% or more of that exhibited by a full-length polypeptide sequence specifically set forth herein.

[0701] A polypeptide “variant,” as the term is used herein, is a polypeptide that typically differs from a polypeptide specifically disclosed herein in one or more substitutions, deletions, additions and/or insertions. Such variants may be naturally occurring or may be synthetically generated, for example, by modifying one or more of the above polypeptide sequences of the invention and evaluating their immunogenic activity as described herein using any of a number of techniques well known in the art.

[0702] For example, certain illustrative variants of the polypeptides of the invention include those in which one or more portions, such as an N-terminal leader sequence or transmembrane domain, have been removed. Other illustrative variants include variants in which a small portion (e.g., 1-30 amino acids, preferably 5-15 amino acids) has been removed from the N- and/or C-terminal of the mature protein.

[0703] In many instances, a variant will contain conservative substitutions. A “conservative substitution” is one in which an amino acid is substituted for another amino acid that has similar properties, such that one skilled in the art of peptide chemistry would expect the secondary structure and hydropathic nature of the polypeptide to be substantially unchanged. As described above, modifications may be made in the structure of the polynucleotides and polypeptides of the present invention and still obtain a functional molecule that encodes a variant or derivative polypeptide with desirable characteristics, e.g., with immunogenic characteristics. When it is desired to alter the amino acid sequence of a polypeptide to create an equivalent, or even an improved, immunogenic variant or portion of a polypeptide of the invention, one skilled in the art will typically change one or more of the codons of the encoding DNA sequence according to Table 1.

[0704] For example, certain amino acids may be substituted for other amino acids in a protein structure without appreciable loss of interactive binding capacity with structures such as, for example, antigen-binding regions of antibodies or binding sites on substrate molecules. Since it is the interactive capacity and nature of a protein that defines that protein's biological functional activity, certain amino acid sequence substitutions can be made in a protein sequence, and, of course, its underlying DNA coding sequence, and nevertheless obtain a protein with like properties. It is thus contemplated that various changes may be made in the peptide sequences of the disclosed compositions, or corresponding DNA sequences which encode said peptides without appreciable loss of their biological utility or activity.

TABLE 1

| Amino Acids | | | Codons |
|---|---|---|---|
| Alanine | Ala | A | GCA GCC GCG GCU |
| Cysteine | Cys | C | UGC UGU |
| Aspartic acid | Asp | D | GAC GAU |
| Glutamic acid | Glu | E | GAA GAG |
| Phenylalanine | Phe | F | UUC UUU |
| Glycine | Giy | G | GGA GGC GGG GGU |
| Histidine | His | H | CAC CAU |
| Isoleucine | Ile | I | AUA AUC AUU |
| Lysine | Lys | K | AAA AAG |
| Leucine | Leu | L | UUA UUG CUA CUC CUG CUU |
| Methionine | Met | M | AUG |
| Asparagine | Asn | N | AAC AAU |
| Proline | Pro | P | CCA CCC CCG CCU |
| Glutamine | Gin | Q | CAA CAG |
| Arginine | Arg | R | AGA AGG CGA CGC CGG CGU |
| Serine | Ser | S | AGC AGU UCA UCC UCG UCU |
| Threonine | Thr | T | ACA ACC ACG ACU |
| Valine | Val | V | GUA GUC GUG GUU |
| Tryptophan | Trp | W | UGG |
| Tyrosine | Tyr | Y | UAC UAU |

[0705] In making such changes, the hydropathic index of amino acids may be considered. The importance of the hydropathic amino acid index in conferring interactive biologic function on a protein is generally understood in the art (Kyte and Doolittle, 1982, incorporated herein by reference). It is accepted that the relative hydropathic character of the amino acid contributes to the secondary structure of the resultant protein, which in turn defines the interaction of the protein with other molecules, for example, enzymes, substrates, receptors, DNA, antibodies, antigens, and the like. Each amino acid has been assigned a hydropathic index on the basis of its hydrophobicity and charge characteristics (Kyte and Doolittle, 1982). These values are: isoleucine (+4.5); valine (+4.2); leucine (+3.8); phenylalanine (+2.8); cysteine/cystine (+2.5); methionine (+1.9); alanine (+1.8); glycine (−0.4); threonine (−0.7); serine (−0.8); tryptophan (−0.9); tyrosine (−1.3); proline (−1.6); histidine (−3.2); glutamate (−3.5); glutamine (−3.5); aspartate (−3.5); asparagine (−3.5); lysine (−3.9); and arginine (−4.5).

[0706] It is known in the art that certain amino acids may be substituted by other amino acids having a similar hydropathic index or score and still result in a protein with similar biological activity, i.e. still obtain a biological functionally equivalent protein. In making such changes, the substitution of amino acids whose hydropathic indices are within ±2 is preferred, those within ±1 are particularly preferred, and those within ±0.5 are even more particularly preferred. It is also understood in the art that the substitution of like amino acids can be made effectively on the basis of hydrophilicity. U.S. Pat. No. 4,554,101 (specifically incorporated herein by reference in its entirety), states that the greatest local average hydrophilicity of a protein, as governed by the hydrophilicity of its adjacent amino acids, correlates with a biological property of the protein.

[0707] As detailed in U.S. Pat. No. 4,554,101, the following hydrophilicity values have been assigned to amino acid residues: arginine (+3.0); lysine (+3.0); aspartate (+3.0±1); glutamate (+3.0±1); serine (+0.3); asparagine (+0.2); glutamine (+0.2); glycine (0); threonine (−0.4); proline (−0.5±1); alanine (−0.5); histidine (−0.5); cysteine (−1.0); methionine (−1.3); valine (−1.5); leucine (−1.8); isoleucine (−1.8); tyrosine (−2.3); phenylalanine (−2.5); tryptophan (−3.4). It is understood that an amino acid can be substituted for another having a similar hydrophilicity value and still obtain a biologically equivalent, and in particular, an immunologically equivalent protein. In such changes, the substitution of amino acids whose hydrophilicity values are within ±2 is preferred, those within ±1 are particularly preferred, and those within ±0.5 are even more particularly preferred.

[0708] As outlined above, amino acid substitutions are generally therefore based on the relative similarity of the amino acid side-chain substituents, for example, their hydrophobicity, hydrophilicity, charge, size, and the like. Exemplary substitutions that take various of the foregoing characteristics into consideration are well known to those of skill in the art and include: arginine and lysine; glutamate and aspartate; serine and threonine; glutamine and asparagine; and valine, leucine and isoleucine.

[0709] In addition, any polynucleotide may be further modified to increase stability in vivo. Possible modifications include, but are not limited to, the addition of flanking sequences at the 5′ and/or 3′ ends; the use of phosphorothioate or 2′ O-methyl rather than phosphodiesterase linkages in the backbone; and/or the inclusion of nontraditional bases such as inosine, queosine and wybutosine, as well as acetyl- methyl-, thio- and other modified forms of adenine, cytidine, guanine, thymine and uridine.

[0710] Amino acid substitutions may further be made on the basis of similarity in polarity, charge, solubility, hydrophobicity, hydrophilicity and/or the amphipathic nature of the residues. For example, negatively charged amino acids include aspartic acid and glutamic acid; positively charged amino acids include lysine and arginine; and amino acids with uncharged polar head groups having similar hydrophilicity values include leucine, isoleucine and valine; glycine and alanine; asparagine and glutamine; and serine, threonine, phenylalanine and tyrosine. Other groups of amino acids that may represent conservative changes include: (1) ala, pro, gly, glu, asp, gln, asn, ser, thr; (2) cys, ser, tyr, thr; (3) val, ile, leu, met, ala, phe; (4) lys, arg, his; and (5) phe, tyr, trp, his. A variant may also, or alternatively, contain nonconservative changes. In a preferred embodiment, variant polypeptides differ from a native sequence by substitution, deletion or addition of five amino acids or fewer. Variants may also (or alternatively) be modified by, for example, the deletion or addition of amino acids that have minimal influence on the immunogenicity, secondary structure and hydropathic nature of the polypeptide.

[0711] As noted above, polypeptides may comprise a signal (or leader) sequence at the N-terminal end of the protein, which co-translationally or post-translationally directs transfer of the protein. The polypeptide may also be conjugated to a linker or other sequence for ease of synthesis, purification or identification of the polypeptide (e.g., poly-His), or to enhance binding of the polypeptide to a solid support. For example, a polypeptide may be conjugated to an immunoglobulin Fc region.

[0712] When comparing polypeptide sequences, two sequences are said to be “identical” if the sequence of amino acids in the two sequences is the same when aligned for maximum correspondence, as described below. Comparisons between two sequences are typically performed by comparing the sequences over a comparison window to identify and compare local regions of sequence similarity. A “comparison window” as used herein, refers to a segment of at least about 20 contiguous positions, usually 30 to about 75, 40 to about 50, in which a sequence may be compared to a reference sequence of the same number of contiguous positions after the two sequences are optimally aligned.

[0713] Optimal alignment of sequences for comparison may be conducted using the Megalign program in the Lasergene suite of bioinformatics software (DNASTAR, Inc., Madison, Wis.), using default parameters. This program embodies several alignment schemes described in the following references: Dayhoff, M. O. (1978) A model of evolutionary change in proteins—Matrices for detecting distant relationships. In Dayhoff, M. O. (ed.) Atlas of Protein Sequence and Structure, National Biomedical Research Foundation, Washington D.C. Vol. 5, Suppl. 3, pp. 345-358; Hein J. (1990) Unified Approach to Alignment and Phylogenes pp. 626-645 Methods in Enzymology vol. 183, Academic Press, Inc., San Diego, Calif.; Higgins, D. G. and Sharp, P. M. (1989) CABIOS 5:151-153; Myers, E. W. and Muller W. (1988) CABIOS 4:11-17; Robinson, E. D. (1971) Comb. Theor 11:105; Santou, N. Nes, M. (1987) Mol. Biol. Evol. 4:406-425; Sneath, P. H. A. and Sokal, R. R. (1973) Numerical Taxonomy—the Principles and Practice of Numerical Taxonomy, Freeman Press, San Francisco, Calif.; Wilbur, W. J. and Lipman, D. J. (1983) Proc. Natl. Acad., Sci. USA 80:726-730.

[0714] Alternatively, optimal alignment of sequences for comparison may be conducted by the local identity algorithm of Smith and Waterman (1981) Add. APL. Math 2:482, by the identity alignment algorithm of Needleman and Wunsch (1970) J. Mol. Biol. 48:443, by the search for similarity methods of Pearson and Lipman (1988) Proc. Natl. Acad. Sci. USA 85: 2444, by computerized implementations of these algorithms (GAP, BESTFIT, BLAST, FASTA, and TFASTA in the Wisconsin Genetics Software Package, Genetics Computer Group (GCG), 575 Science Dr., Madison, Wis.), or by inspection.

[0715] One preferred example of algorithms that are suitable for determining percent sequence identity and sequence similarity are the BLAST and BLAST 2.0 algorithms, which are described in Altschul et al. (1977) Nucl. Acids Res. 25:3389-3402 and Altschul et al. (1990) J. Mol. Biol. 215:403-410, respectively. BLAST and BLAST 2.0 can be used, for example with the parameters described herein, to determine percent sequence identity for the polynucleotides and polypeptides of the invention. Software for performing BLAST analyses is publicly available through the National Center for Biotechnology Information. For amino acid sequences, a scoring matrix can be used to calculate the cumulative score. Extension of the word hits in each direction are halted when: the cumulative alignment score falls off by the quantity X from its maximum achieved value; the cumulative score goes to zero or below, due to the accumulation of one or more negative-scoring residue alignments; or the end of either sequence is reached. The BLAST algorithm parameters W, T and X determine the sensitivity and speed of the alignment.

[0716] In one preferred approach, the “percentage of sequence identity” is determined by comparing two optimally aligned sequences over a window of comparison of at least 20 positions, wherein the portion of the polypeptide sequence in the comparison window may comprise additions or deletions (i.e., gaps) of 20 percent or less, usually 5 to 15 percent, or 10 to 12 percent, as compared to the reference sequences (which does not comprise additions or deletions) for optimal alignment of the two sequences. The percentage is calculated by determining the number of positions at which the identical amino acid residue occurs in both sequences to yield the number of matched positions, dividing the number of matched positions by the total number of positions in the reference sequence (i.e., the window size) and multiplying the results by 100 to yield the percentage of sequence identity.

[0717] Within other illustrative embodiments, a polypeptide may be a fusion polypeptide that comprises multiple polypeptides as described herein, or that comprises at least one polypeptide as described herein and an unrelated sequence, such as a known tumor protein. A fusion partner may, for example, assist in providing T helper epitopes (an immunological fusion partner), preferably T helper epitopes recognized by humans, or may assist in expressing the protein (an expression enhancer) at higher yields than the native recombinant protein. Certain preferred fusion partners are both immunological and expression enhancing fusion partners. Other fusion partners may be selected so as to increase the solubility of the polypeptide or to enable the polypeptide to be targeted to desired intracellular compartments. Still further fusion partners include affinity tags, which facilitate purification of the polypeptide.

[0718] Fusion polypeptides may generally be prepared using standard techniques, including chemical conjugation. Preferably, a fusion polypeptide is expressed as a recombinant polypeptide, allowing the production of increased levels, relative to a non-fused polypeptide, in an expression system. Briefly, DNA sequences encoding the polypeptide components may be assembled separately, and ligated into an appropriate expression vector. The 3′ end of the DNA sequence encoding one polypeptide component is ligated, with or without a peptide linker, to the 5′ end of a DNA sequence encoding the second polypeptide component so that the reading frames of the sequences are in phase. This permits translation into a single fusion polypeptide that retains the biological activity of both component polypeptides.

[0719] A peptide linker sequence may be employed to separate the first and second polypeptide components by a distance sufficient to ensure that each polypeptide folds into its secondary and tertiary structures. Such a peptide linker sequence is incorporated into the fusion polypeptide using standard techniques well known in the art. Suitable peptide linker sequences may be chosen based on the following factors: (1) their ability to adopt a flexible extended conformation; (2) their inability to adopt a secondary structure that could interact with functional epitopes on the first and second polypeptides; and (3) the lack of hydrophobic or charged residues that might react with the polypeptide functional epitopes. Preferred peptide linker sequences contain Gly, Asn and Ser residues. Other near neutral amino acids, such as Thr and Ala may also be used in the linker sequence. Amino acid sequences which may be usefully employed as linkers include those disclosed in Maratea et al., Gene 40:39-46, 1985; Murphy et al., Proc. Natl. Acad. Sci. USA 83:8258-8262, 1986; U.S. Pat. No. 4,935,233 and U.S. Pat. No. 4,751,180. The linker sequence may generally be from 1 to about 50 amino acids in length. Linker sequences are not required when the first and second polypeptides have non-essential N-terminal amino acid regions that can be used to separate the functional domains and prevent steric interference.

[0720] The ligated DNA sequences are operably linked to suitable transcriptional or translational regulatory elements. The regulatory elements responsible for expression of DNA are located only 5′ to the DNA sequence encoding the first polypeptides. Similarly, stop codons required to end translation and transcription termination signals are only present 3′ to the DNA sequence encoding the second polypeptide.

[0721] The fusion polypeptide can comprise a polypeptide as described herein together with an unrelated immunogenic protein, such as an immunogenic protein capable of eliciting a recall response. Examples of such proteins include tetanus, tuberculosis and hepatitis proteins (see, for example, Stoute et al. New Engl. J. Med., 336:86-91, 1997).

[0722] In one preferred embodiment, the immunological fusion partner is derived from a Mycobacterium sp., such as a Mycobacterium tuberculosis-derived Ra12 fragment. Ra12 compositions and methods for their use in enhancing the expression and/or immunogenicity of heterologous polynucleotide/polypeptide sequences is described in U.S. patent application Ser. No. 60/158,585, the disclosure of which is incorporated herein by reference in its entirety. Briefly, Ra12 refers to a polynucleotide region that is a subsequence of a Mycobacterium tuberculosis MTB32A nucleic acid. MTB32A is a serine protease of 32 KD molecular weight encoded by a gene in virulent and avirulent strains of M. tuberculosis. The nucleotide sequence and amino acid sequence of MTB32A have been described (for example, U.S. patent application Ser. No. 60/158,585; see also, Skeiky et al., Infection and Immun. (1999) 67:3998-4007, incorporated herein by reference). C-terminal fragments of the MTB32A coding sequence express at high levels and remain as a soluble polypeptides throughout the purification process. Moreover, Ra12 may enhance the immunogenicity of heterologous immunogenic polypeptides with which it is fused. One preferred Ra12 fusion polypeptide comprises a 14 KD C-terminal fragment corresponding to amino acid residues 192 to 323 of MTB32A. Other preferred Ra12 polynucleotides generally comprise at least about 15 consecutive nucleotides, at least about 30 nucleotides, at least about 60 nucleotides, at least about 100 nucleotides, at least about 200 nucleotides, or at least about 300 nucleotides that encode a portion of a Ra12 polypeptide. Ra12 polynucleotides may comprise a native sequence (i.e., an endogenous sequence that encodes a Ra12 polypeptide or a portion thereof) or may comprise a variant of such a sequence. Ra12 polynucleotide variants may contain one or more substitutions, additions, deletions and/or insertions such that the biological activity of the encoded fusion polypeptide is not substantially diminished, relative to a fusion polypeptide comprising a native Ra12 polypeptide. Variants preferably exhibit at least about 70% identity, more preferably at least about 80% identity and most preferably at least about 90% identity to a polynucleotide sequence that encodes a native Ra12 polypeptide or a portion thereof.

[0723] Within other preferred embodiments, an immunological fusion partner is derived from protein D, a surface protein of the gram-negative bacterium Haemophilus influenza B (WO 91/18926). Preferably, a protein D derivative comprises approximately the first third of the protein (e.g., the first N-terminal 100-110 amino acids), and a protein D derivative may be lipidated. Within certain preferred embodiments, the first 109 residues of a Lipoprotein D fusion partner is included on the N-terminus to provide the polypeptide with additional exogenous T-cell epitopes and to increase the expression level in E. coli (thus functioning as an expression enhancer). The lipid tail ensures optimal presentation of the antigen to antigen presenting cells. Other fusion partners include the non-structural protein from influenzae virus, NSl (hemaglutinin). Typically, the N-terminal 81 amino acids are used, although different fragments that include T-helper epitopes may be used.

[0724] In another embodiment, the immunological fusion partner is the protein known as LYTA, or a portion thereof (preferably a C-terminal portion). LYTA is derived from Streptococcus pneumoniae, which synthesizes an N-acetyl-L-alanine amidase known as amidase LYTA (encoded by the LytA gene; Gene 43:265-292, 1986). LYTA is an autolysin that specifically degrades certain bonds in the peptidoglycan backbone. The C-terminal domain of the LYTA protein is responsible for the affinity to the choline or to some choline analogues such as DEAE. This property has been exploited for the development of E. coli C-LYTA expressing plasmids useful for expression of fusion proteins. Purification of hybrid proteins containing the C-LYTA fragment at the amino terminus has been described (see Biotechnology 10:795-798, 1992). Within a preferred embodiment, a repeat portion of LYTA may be incorporated into a fusion polypeptide. A repeat portion is found in the C-terminal region starting at residue 178. A particularly preferred repeat portion incorporates residues 188-305.

[0725] Yet another illustrative embodiment involves fusion polypeptides, and the polynucleotides encoding them, wherein the fusion partner comprises a targeting signal capable of directing a polypeptide to the endosomal/lysosomal compartment, as described in U.S. Pat. No. 5,633,234. An immunogenic polypeptide of the invention, when fused with this targeting signal, will associate more efficiently with MHC class II molecules and thereby provide enhanced in vivo stimulation of CD4⁺ T-cells specific for the polypeptide.

[0726] Polypeptides of the invention are prepared using any of a variety of well known synthetic and/or recombinant techniques, the latter of which are further described below. Polypeptides, portions and other variants generally less than about 150 amino acids can be generated by synthetic means, using techniques well known to those of ordinary skill in the art. In one illustrative example, such polypeptides are synthesized using any of the commercially available solid-phase techniques, such as the Merrifield solid-phase synthesis method, where amino acids are sequentially added to a growing amino acid chain. See Merrifield, J. Am. Chem. Soc. 85:2149-2146, 1963. Equipment for automated synthesis of polypeptides is commercially available from suppliers such as Perkin Elmer/Applied BioSystems Division (Foster City, Calif.), and may be operated according to the manufacturer's instructions.

[0727] In general, polypeptide compositions (including fusion polypeptides) of the invention are isolated. An “isolated” polypeptide is one that is removed from its original environment. For example, a naturally-occurring protein or polypeptide is isolated if it is separated from some or all of the coexisting materials in the natural system. Preferably, such polypeptides are also purified, e.g., are at least about 90% pure, more preferably at least about 95% pure and most preferably at least about 99% pure.

[0728] Polynucleotide Compositions

[0729] The present invention, in other aspects, provides polynucleotide compositions. The terms “DNA” and “polynucleotide” are used essentially interchangeably herein to refer to a DNA molecule that has been isolated free of total genomic DNA of a particular species. “Isolated,” as used herein, means that a polynucleotide is substantially away from other coding sequences, and that the DNA molecule does not contain large portions of unrelated coding DNA, such as large chromosomal fragments or other functional genes or polypeptide coding regions. Of course, this refers to the DNA molecule as originally isolated, and does not exclude genes or coding regions later added to the segment by the hand of man.

[0730] As will be understood by those skilled in the art, the polynucleotide compositions of this invention can include genomic sequences, extra-genomic and plasmid-encoded sequences and smaller engineered gene segments that express, or may be adapted to express, proteins, polypeptides, peptides and the like. Such segments may be naturally isolated, or modified synthetically by the hand of man.

[0731] As will be also recognized by the skilled artisan, polynucleotides of the invention may be single-stranded (coding or antisense) or double-stranded, and may be DNA (genomic, cDNA or synthetic) or RNA molecules. RNA molecules may include HnRNA molecules, which contain introns and correspond to a DNA molecule in a one-to-one manner, and mRNA molecules, which do not contain introns. Additional coding or non-coding sequences may, but need not, be present within a polynucleotide of the present invention, and a polynucleotide may, but need not, be linked to other molecules and/or support materials.

[0732] Polynucleotides may comprise a native sequence (i. e., an endogenous sequence that encodes a polypeptide/protein of the invention or a portion thereof) or may comprise a sequence that encodes a variant or derivative, preferably an immunogenic variant or derivative, of such a sequence.

[0733] Therefore, according to another aspect of the present invention, polynucleotide compositions are provided that comprise some or all of a polynucleotide sequence set forth in any one of SEQ ID NOs: 1-111, 115-171, 173-175, 177, 179-305, 307-315, 326, 328, 330, 332-335, 340-375, 381, 382 and 384-476, 524, 526, 530, 531, 533, 535, 536, 552, 569-572, 587, 591, 593-606, 618-705, 709-774, 777, 789, 817, 823, 824, 878, 880-882, 894, 896, 907, 908, 916-919, 929-931, 938, 939, 942, 944, 945, 948, 967 and 969-976, complements of a polynucleotide sequence set forth in any one of SEQ ID NOs: 1-111, 115-171, 173-175, 177, 179-305, 307-315, 326, 328, 330, 332-335, 340-375, 381, 382 and 384-476, 524, 526, 530, 531, 533, 535, 536, 552, 569-572, 587, 591, 593-606, 618-705, 709-774, 777, 789, 817, 823, 824, 878, 880-882, 894, 896, 907, 908, 916-919, 929-931, 938, 939, 942, 944, 945, 948, 967 and 969-976, and degenerate variants of a polynucleotide sequence set forth in any one of SEQ ID NOs: 1-111, 115-171, 173-175, 177, 179-305, 307-315, 326, 328, 330, 332-335, 340-375, 381, 382 and 384-476, 524, 526, 530, 531, 533, 535, 536, 552, 569-572, 587, 591, 593-606, 618-705, 709-774, 777, 789, 817, 823, 824, 878, 880-882, 894, 896, 907, 908, 916-919, 929-931, 938, 939, 942, 944, 945, 948, 967 and 969-976. In certain preferred embodiments, the polynucleotide sequences set forth herein encode immunogenic polypeptides, as described above.

[0734] In other related embodiments, the present invention provides polynucleotide variants having substantial identity to the sequences disclosed herein in SEQ ID NOs: 1-111, 115-171, 173-175, 177, 179-305, 307-315, 326, 328, 330, 332-335, 340-375, 381, 382 and 384-476, 524, 526, 530, 531, 533, 535, 536, 552, 569-572, 587, 591, 593-606, 618-705, 709-774, 777, 789, 817, 823, 824, 878, 880-882, 894, 896, 907, 908, 916-919, 929-931, 938, 939, 942, 944, 945, 948, 967 and 969-976, for example those comprising at least 70% sequence identity, preferably at least 75%, 80%, 85%, 90%, 95%, 96%, 97%, 98%, or 99% or higher, sequence identity compared to a polynucleotide sequence of this invention using the methods described herein, (e.g., BLAST analysis using standard parameters, as described below). One skilled in this art will recognize that these values can be appropriately adjusted to determine corresponding identity of proteins encoded by two nucleotide sequences by taking into account codon degeneracy, amino acid similarity, reading frame positioning and the like.

[0735] Typically, polynucleotide variants will contain one or more substitutions, additions, deletions and/or insertions, preferably such that the immunogenicity of the polypeptide encoded by the variant polynucleotide is not substantially diminished relative to a polypeptide encoded by a polynucleotide sequence specifically set forth herein). The term “variants” should also be understood to encompasses homologous genes of xenogenic origin.

[0736] In additional embodiments, the present invention provides polynucleotide fragments comprising various lengths of contiguous stretches of sequence identical to, or complementary to, one or more of the sequences disclosed herein. For example, polynucleotides are provided by this invention that comprise at least about 10, 15, 20, 30, 40, 50, 75, 100, 150, 200, 300, 400, 500 or 1000 or more contiguous nucleotides of one or more of the sequences disclosed herein as well as all intermediate lengths there between. It will be readily understood that “intermediate lengths”, in this context, means any length between the quoted values, such as 16, 17, 18, 19, etc.; 21, 22, 23, etc.; 30, 31, 32, etc.; 50, 51, 52, 53, etc.; 100, 101, 102, 103, etc.; 150, 151, 152, 153, etc.; including all integers through 200-500; 500-1,000, and the like.

[0737] In another embodiment of the invention, polynucleotide compositions are provided that are capable of hybridizing under moderate to high stringency conditions to a polynucleotide sequence provided herein, or a fragment thereof, or a complementary sequence thereof. Hybridization techniques are well known in the art of molecular biology. For purposes of illustration, suitable moderately stringent conditions for testing the hybridization of a polynucleotide of this invention with other polynucleotides include prewashing in a solution of 5×SSC, 0.5% SDS, 1.0 mM EDTA (pH 8.0); hybridizing at 50° C.-60° C., 5×SSC, overnight; followed by washing twice at 65° C. for 20 minutes with each of 2×, 0.5× and 0.2×SSC containing 0.1% SDS. One skilled in the art will understand that the stringency of hybridization can be readily manipulated, such as by altering the salt content of the hybridization solution and/or the temperature at which the hybridization is performed. For example, in another embodiment, suitable highly stringent hybridization conditions include those described above, with the exception that the temperature of hybridization is increased, e.g., to 60-65° C. or 65-70° C.

[0738] In certain preferred embodiments, the polynucleotides described above, e.g., polynucleotide variants, fragments and hybridizing sequences, encode polypeptides that are immunologically cross-reactive with a polypeptide sequence specifically set forth herein. In other preferred embodiments, such polynucleotides encode polypeptides that have a level of immunogenic activity of at least about 50%, preferably at least about 70%, and more preferably at least about 90% of that for a polypeptide sequence specifically set forth herein.

[0739] The polynucleotides of the present invention, or fragments thereof, regardless of the length of the coding sequence itself, may be combined with other DNA sequences, such as promoters, polyadenylation signals, additional restriction enzyme sites, multiple cloning sites, other coding segments, and the like, such that their overall length may vary considerably. It is therefore contemplated that a nucleic acid fragment of almost any length may be employed, with the total length preferably being limited by the ease of preparation and use in the intended recombinant DNA protocol. For example, illustrative polynucleotide segments with total lengths of about 10,000, about 5000, about 3000, about 2,000, about 1,000, about 500, about 200, about 100, about 50 base pairs in length, and the like, (including all intermediate lengths) are contemplated to be useful in many implementations of this invention.

[0740] When comparing polynucleotide sequences, two sequences are said to be “identical” if the sequence of nucleotides in the two sequences is the same when aligned for maximum correspondence, as described below. Comparisons between two sequences are typically performed by comparing the sequences over a comparison window to identify and compare local regions of sequence similarity. A “comparison window” as used herein, refers to a segment of at least about 20 contiguous positions, usually 30 to about 75, preferably 40 to about 50, in which a sequence may be compared to a reference sequence of the same number of contiguous positions after the two sequences are optimally aligned.

[0741] Optimal alignment of sequences for comparison may be conducted using the Megalign program in the Lasergene suite of bioinformatics software (DNASTAR, Inc., Madison, Wis.), using default parameters. This program embodies several alignment schemes described in the following references: Dayhoff, M. O. (1978) A model of evolutionary change in proteins—Matrices for detecting distant relationships. In Dayhoff, M. O. (ed.) Atlas of Protein Sequence and Structure, National Biomedical Research Foundation, Washington D.C. Vol. 5, Suppl. 3, pp. 345-358; Hein J. (1990) Unified Approach to Alignment and Phylogenes pp. 626-645 Methods in Enzymology vol. 183, Academic Press, Inc., San Diego, Calif.; Higgins, D. G. and Sharp, P. M. (1989) CABIOS 5:151-153; Myers, E. W. and Muller W. (1988) CABIOS 4:11-17; Robinson, E. D. (1971) Comb. Theor 11:105; Santou, N. Nes, M. (1987) Mol. Biol. Evol. 4:406-425; Sneath, P. H. A. and Sokal, R. R. (1973) Numerical Taxonomy—the Principles and Practice of Numerical Taxonomy, Freeman Press, San Francisco, Calif.; Wilbur, W. J. and Lipman, D. J. (1983) Proc. Natl. Acad., Sci. USA 80:726-730.

[0742] Alternatively, optimal alignment of sequences for comparison may be conducted by the local identity algorithm of Smith and Waterman (1981) Add. APL. Math 2:482, by the identity alignment algorithm of Needleman and Wunsch (1970) J. Mol. Biol. 48:443, by the search for similarity methods of Pearson and Lipman (1988) Proc. Natl. Acad. Sci. USA 85: 2444, by computerized implementations of these algorithms (GAP, BESTFIT, BLAST, FASTA, and TFASTA in the Wisconsin Genetics Software Package, Genetics Computer Group (GCG), 575 Science Dr., Madison, Wis.), or by inspection.

[0743] One preferred example of algorithms that are suitable for determining percent sequence identity and sequence similarity are the BLAST and BLAST 2.0 algorithms, which are described in Altschul et al. (1977) Nucl. Acids Res. 25:3389-3402 and Altschul et al. (1990) J. Mol. Biol. 215:403-410, respectively. BLAST and BLAST 2.0 can be used, for example with the parameters described herein, to determine percent sequence identity for the polynucleotides of the invention. Software for performing BLAST analyses is publicly available through the National Center for Biotechnology Information. In one illustrative example, cumulative scores can be calculated using, for nucleotide sequences, the parameters M (reward score for a pair of matching residues; always >0) and N (penalty score for mismatching residues; always <0). Extension of the word hits in each direction are halted when: the cumulative alignment score falls off by the quantity X from its maximum achieved value; the cumulative score goes to zero or below, due to the accumulation of one or more negative-scoring residue alignments; or the end of either sequence is reached. The BLAST algorithm parameters W, T and X determine the sensitivity and speed of the alignment. The BLASTN program (for nucleotide sequences) uses as defaults a wordlength (W) of 11, and expectation (E) of 10, and the BLOSUM62 scoring matrix (see Henikoff and Henikoff (1989) Proc. Natl. Acad. Sci. USA 89:10915) alignments, (B) of 50, expectation (E) of 10, M=5, N=−4 and a comparison of both strands.

[0744] Preferably, the “percentage of sequence identity” is determined by comparing two optimally aligned sequences over a window of comparison of at least 20 positions, wherein the portion of the polynucleotide sequence in the comparison window may comprise additions or deletions (i.e., gaps) of 20 percent or less, usually 5 to 15 percent, or 10 to 12 percent, as compared to the reference sequences (which does not comprise additions or deletions) for optimal alignment of the two sequences. The percentage is calculated by determining the number of positions at which the identical nucleic acid bases occurs in both sequences to yield the number of matched positions, dividing the number of matched positions by the total number of positions in the reference sequence (i.e., the window size) and multiplying the results by 100 to yield the percentage of sequence identity.

[0745] It will be appreciated by those of ordinary skill in the art that, as a result of the degeneracy of the genetic code, there are many nucleotide sequences that encode a polypeptide as described herein. Some of these polynucleotides bear minimal homology to the nucleotide sequence of any native gene. Nonetheless, polynucleotides that vary due to differences in codon usage are specifically contemplated by the present invention. Further, alleles of the genes comprising the polynucleotide sequences provided herein are within the scope of the present invention. Alleles are endogenous genes that are altered as a result of one or more mutations, such as deletions, additions and/or substitutions of nucleotides. The resulting mRNA and protein may, but need not, have an altered structure or function. Alleles may be identified using standard techniques (such as hybridization, amplification and/or database sequence comparison).

[0746] Therefore, in another embodiment of the invention, a mutagenesis approach, such as site-specific mutagenesis, is employed for the preparation of immunogenic variants and/or derivatives of the polypeptides described herein. By this approach, specific modifications in a polypeptide sequence can be made through mutagenesis of the underlying polynucleotides that encode them. These techniques provides a straightforward approach to prepare and test sequence variants, for example, incorporating one or more of the foregoing considerations, by introducing one or more nucleotide sequence changes into the polynucleotide.

[0747] Site-specific mutagenesis allows the production of mutants through the use of specific oligonucleotide sequences which encode the DNA sequence of the desired mutation, as well as a sufficient number of adjacent nucleotides, to provide a primer sequence of sufficient size and sequence complexity to form a stable duplex on both sides of the deletion junction being traversed. Mutations may be employed in a selected polynucleotide sequence to improve, alter, decrease, modify, or otherwise change the properties of the polynucleotide itself, and/or alter the properties, activity, composition, stability, or primary sequence of the encoded polypeptide.

[0748] In certain embodiments of the present invention, the inventors contemplate the mutagenesis of the disclosed polynucleotide sequences to alter one or more properties of the encoded polypeptide, such as the immunogenicity of a polypeptide vaccine. The techniques of site-specific mutagenesis are well-known in the art, and are widely used to create variants of both polypeptides and polynucleotides. For example, site-specific mutagenesis is often used to alter a specific portion of a DNA molecule. In such embodiments, a primer comprising typically about 14 to about 25 nucleotides or so in length is employed, with about 5 to about 10 residues on both sides of the junction of the sequence being altered.

[0749] As will be appreciated by those of skill in the art, site-specific mutagenesis techniques have often employed a phage vector that exists in both a single stranded and double stranded form. Typical vectors useful in site-directed mutagenesis include vectors such as the M13 phage. These phage are readily commercially-available and their use is generally well-known to those skilled in the art. Double-stranded plasmids are also routinely employed in site directed mutagenesis that eliminates the step of transferring the gene of interest from a plasmid to a phage.

[0750] In general, site-directed mutagenesis in accordance herewith is performed by first obtaining a single-stranded vector or melting apart of two strands of a double-stranded vector that includes within its sequence a DNA sequence that encodes the desired peptide. An oligonucleotide primer bearing the desired mutated sequence is prepared, generally synthetically. This primer is then annealed with the single-stranded vector, and subjected to DNA polymerizing enzymes such as E. coli polymerase I Klenow fragment, in order to complete the synthesis of the mutation-bearing strand. Thus, a heteroduplex is formed wherein one strand encodes the original non-mutated sequence and the second strand bears the desired mutation. This heteroduplex vector is then used to transform appropriate cells, such as E. coli cells, and clones are selected which include recombinant vectors bearing the mutated sequence arrangement.

[0751] The preparation of sequence variants of the selected peptide-encoding DNA segments using site-directed mutagenesis provides a means of producing potentially useful species and is not meant to be limiting as there are other ways in which sequence variants of peptides and the DNA sequences encoding them may be obtained. For example, recombinant vectors encoding the desired peptide sequence may be treated with mutagenic agents, such as hydroxylamine, to obtain sequence variants. Specific details regarding these methods and protocols are found in the teachings of Maloy et al., 1994; Segal, 1976; Prokop and Bajpai, 1991; Kuby, 1994; and Maniatis et al., 1982, each incorporated herein by reference, for that purpose.

[0752] As used herein, the term “oligonucleotide directed mutagenesis procedure” refers to template-dependent processes and vector-mediated propagation which result in an increase in the concentration of a specific nucleic acid molecule relative to its initial concentration, or in an increase in the concentration of a detectable signal, such as amplification. As used herein, the term “oligonucleotide directed mutagenesis procedure” is intended to refer to a process that involves the template-dependent extension of a primer molecule. The term template dependent process refers to nucleic acid synthesis of an RNA or a DNA molecule wherein the sequence of the newly synthesized strand of nucleic acid is dictated by the well-known rules of complementary base pairing (see, for example, Watson, 1987). Typically, vector mediated methodologies involve the introduction of the nucleic acid fragment into a DNA or RNA vector, the clonal amplification of the vector, and the recovery of the amplified nucleic acid fragment. Examples of such methodologies are provided by U.S. Pat. No. 4,237,224, specifically incorporated herein by reference in its entirety.

[0753] In another approach for the production of polypeptide variants of the present invention, recursive sequence recombination, as described in U.S. Pat. No. 5,837,458, may be employed. In this approach, iterative cycles of recombination and screening or selection are performed to “evolve” individual polynucleotide variants of the invention having, for example, enhanced immunogenic activity.

[0754] In other embodiments of the present invention, the polynucleotide sequences provided herein can be advantageously used as probes or primers for nucleic acid hybridization. As such, it is contemplated that nucleic acid segments that comprise a sequence region of at least about 15 contiguous nucleotides that has the same sequence as, or is complementary to, a 15 nucleotide long contiguous sequence disclosed herein will find particular utility. Longer contiguous identical or complementary sequences, e.g., those of about 20, 30, 40, 50, 100, 200, 500, 1000 (including all intermediate lengths) and even up to full length sequences will also be of use in certain embodiments.

[0755] The ability of such nucleic acid probes to specifically hybridize to a sequence of interest will enable them to be of use in detecting the presence of complementary sequences in a given sample. However, other uses are also envisioned, such as the use of the sequence information for the preparation of mutant species primers, or primers for use in preparing other genetic constructions.

[0756] Polynucleotide molecules having sequence regions consisting of contiguous nucleotide stretches of 10-14, 15-20, 30, 50, or even of 100-200 nucleotides or so (including intermediate lengths as well), identical or complementary to a polynucleotide sequence disclosed herein, are particularly contemplated as hybridization probes for use in, e.g., Southern and Northern blotting. This would allow a gene product, or fragment thereof, to be analyzed, both in diverse cell types and also in various bacterial cells. The total size of fragment, as well as the size of the complementary stretch(es), will ultimately depend on the intended use or application of the particular nucleic acid segment. Smaller fragments will generally find use in hybridization embodiments, wherein the length of the contiguous complementary region may be varied, such as between about 15 and about 100 nucleotides, but larger contiguous complementarity stretches may be used, according to the length complementary sequences one wishes to detect.

[0757] The use of a hybridization probe of about 15-25 nucleotides in length allows the formation of a duplex molecule that is both stable and selective. Molecules having contiguous complementary sequences over stretches greater than 15 bases in length are generally preferred, though, in order to increase stability and selectivity of the hybrid, and thereby improve the quality and degree of specific hybrid molecules obtained. One will generally prefer to design nucleic acid molecules having gene-complementary stretches of 15 to 25 contiguous nucleotides, or even longer where desired.

[0758] Hybridization probes may be selected from any portion of any of the sequences disclosed herein. All that is required is to review the sequences set forth herein, or to any continuous portion of the sequences, from about 15-25 nucleotides in length up to and including the full length sequence, that one wishes to utilize as a probe or primer. The choice of probe and primer sequences may be governed by various factors. For example, one may wish to employ primers from towards the termini of the total sequence.

[0759] Small polynucleotide segments or fragments may be readily prepared by, for example, directly synthesizing the fragment by chemical means, as is commonly practiced using an automated oligonucleotide synthesizer. Also, fragments may be obtained by application of nucleic acid reproduction technology, such as the PCR™ technology of U.S. Pat. No. 4,683,202 (incorporated herein by reference), by introducing selected sequences into recombinant vectors for recombinant production, and by other recombinant DNA techniques generally known to those of skill in the art of molecular biology.

[0760] The nucleotide sequences of the invention may be used for their ability to selectively form duplex molecules with complementary stretches of the entire gene or gene fragments of interest. Depending on the application envisioned, one will typically desire to employ varying conditions of hybridization to achieve varying degrees of selectivity of probe towards target sequence. For applications requiring high selectivity, one will typically desire to employ relatively stringent conditions to form the hybrids, e.g., one will select relatively low salt and/or high temperature conditions, such as provided by a salt concentration of from about 0.02 M to about 0.15 M salt at temperatures of from about 50° C. to about 70° C. Such selective conditions tolerate little, if any, mismatch between the probe and the template or target strand, and would be particularly suitable for isolating related sequences.

[0761] Of course, for some applications, for example, where one desires to prepare mutants employing a mutant primer strand hybridized to an underlying template, less stringent (reduced stringency) hybridization conditions will typically be needed in order to allow formation of the heteroduplex. In these circumstances, one may desire to employ salt conditions such as those of from about 0.15 M to about 0.9 M salt, at temperatures ranging from about 20° C. to about 55° C. Cross-hybridizing species can thereby be readily identified as positively hybridizing signals with respect to control hybridizations. In any case, it is generally appreciated that conditions can be rendered more stringent by the addition of increasing amounts of formamide, which serves to destabilize the hybrid duplex in the same manner as increased temperature. Thus, hybridization conditions can be readily manipulated, and thus will generally be a method of choice depending on the desired results.

[0762] According to another embodiment of the present invention, polynucleotide compositions comprising antisense oligonucleotides are provided. Antisense oligonucleotides have been demonstrated to be effective and targeted inhibitors of protein synthesis, and, consequently, provide a therapeutic approach by which a disease can be treated by inhibiting the synthesis of proteins that contribute to the disease. The efficacy of antisense oligonucleotides for inhibiting protein synthesis is well established. For example, the synthesis of polygalactauronase and the muscarine type 2 acetylcholine receptor are inhibited by antisense oligonucleotides directed to their respective mRNA sequences (U.S. Pat. Nos. 5,739,119 and 5,759,829). Further, examples of antisense inhibition have been demonstrated with the nuclear protein cyclin, the multiple drug resistance gene (MDG1), ICAM-1, E-selectin, STK-1, striatal GABAA receptor and human EGF (Jaskulski et al., Science. Jun. 10, 1988;240(4858):1544-6; Vasanthakumar and Ahmed, Cancer Commun. 1989;1(4):225-32; Peris et al., Brain Res Mol Brain Res. Jun. 15, 1998;57(2):310-20; U.S. Pat. Nos. 5,801,154; 5,789,573; 5,718,709 and 5,610,288). Antisense constructs have also been described that inhibit and can be used to treat a variety of abnormal cellular proliferations, e.g. cancer (U.S. Pat. Nos. 5,747,470; 5,591,317 and 5,783,683).

[0763] Therefore, in certain embodiments, the present invention provides oligonucleotide sequences that comprise all, or a portion of, any sequence that is capable of specifically binding to polynucleotide sequence described herein, or a complement thereof. In one embodiment, the antisense oligonucleotides comprise DNA or derivatives thereof. In another embodiment, the oligonucleotides comprise RNA or derivatives thereof. In a third embodiment, the oligonucleotides are modified DNAs comprising a phosphorothioated modified backbone. In a fourth embodiment, the oligonucleotide sequences comprise peptide nucleic acids or derivatives thereof. In each case, preferred compositions comprise a sequence region that is complementary, and more preferably substantially-complementary, and even more preferably, completely complementary to one or more portions of polynucleotides disclosed herein. Selection of antisense compositions specific for a given gene sequence is based upon analysis of the chosen target sequence and determination of secondary structure, Tₘ, binding energy, and relative stability. Antisense compositions may be selected based upon their relative inability to form dimers, hairpins, or other secondary structures that would reduce or prohibit specific binding to the target mRNA in a host cell. Highly preferred target regions of the mRNA, are those which are at or near the AUG translation initiation codon, and those sequences which are substantially complementary to 5′ regions of the mRNA. These secondary structure analyses and target site selection considerations can be performed, for example, using v.4 of the OLIGO primer analysis software and/or the BLASTN 2.0.5 algorithm software (Altschul et al., Nucleic Acids Res. Sep. 1, 1997;25(17):3389-402).

[0764] The use of an antisense delivery method employing a short peptide vector, termed MPG (27 residues), is also contemplated. The MPG peptide contains a hydrophobic domain derived from the fusion sequence of HIV gp41 and a hydrophilic domain from the nuclear localization sequence of SV40 T-antigen (Morris et al., Nucleic Acids Res. Jul. 15, 1997;25(14):2730-6). It has been demonstrated that several molecules of the MPG peptide coat the antisense oligonucleotides and can be delivered into cultured mammalian cells in less than 1 hour with relatively high efficiency (90%). Further, the interaction with MPG strongly increases both the stability of the oligonucleotide to nuclease and the ability to cross the plasma membrane.

[0765] According to another embodiment of the invention, the polynucleotide compositions described herein are used in the design and preparation of ribozyme molecules for inhibiting expression of the tumor polypeptides and proteins of the present invention in tumor cells. Ribozymes are RNA-protein complexes that cleave nucleic acids in a site-specific fashion. Ribozymes have specific catalytic domains that possess endonuclease activity (Kim and Cech, Proc Natl Acad Sci USA. 1987 December; 84(24):8788-92; Forster and Symons, Cell. Apr. 24, 1987;49(2):211-20). For example, a large number of ribozymes accelerate phosphoester transfer reactions with a high degree of specificity, often cleaving only one of several phosphoesters in an oligonucleotide substrate (Cech et al., Cell. 1981 December; 27(3 Pt 2):487-96; Michel and Westhof, J Mol Biol. Dec. 5, 1990;216(3):585-610; Reinhold-Hurek and Shub, Nature. May 14, 1992;357(6374):173-6). This specificity has been attributed to the requirement that the substrate bind via specific base-pairing interactions to the internal guide sequence (“IGS”) of the ribozyme prior to chemical reaction.

[0766] Six basic varieties of naturally-occurring enzymatic RNAs are known presently. Each can catalyze the hydrolysis of RNA phosphodiester bonds in trans (and thus can cleave other RNA molecules) under physiological conditions. In general, enzymatic nucleic acids act by first binding to a target RNA. Such binding occurs through the target binding portion of a enzymatic nucleic acid which is held in close proximity to an enzymatic portion of the molecule that acts to cleave the target RNA. Thus, the enzymatic nucleic acid first recognizes and then binds a target RNA through complementary base-pairing, and once bound to the correct site, acts enzymatically to cut the target RNA. Strategic cleavage of such a target RNA will destroy its ability to direct synthesis of an encoded protein. After an enzymatic nucleic acid has bound and cleaved its RNA target, it is released from that RNA to search for another target and can repeatedly bind and cleave new targets.

[0767] The enzymatic nature of a ribozyme is advantageous over many technologies, such as antisense technology (where a nucleic acid molecule simply binds to a nucleic acid target to block its translation) since the concentration of ribozyme necessary to affect a therapeutic treatment is lower than that of an antisense oligonucleotide. This advantage reflects the ability of the ribozyme to act enzymatically. Thus, a single ribozyme molecule is able to cleave many molecules of target RNA. In addition, the ribozyme is a highly specific inhibitor, with the specificity of inhibition depending not only on the base pairing mechanism of binding to the target RNA, but also on the mechanism of target RNA cleavage. Single mismatches, or base-substitutions, near the site of cleavage can completely eliminate catalytic activity of a ribozyme. Similar mismatches in antisense molecules do not prevent their action (Woolf et al., Proc Natl Acad Sci USA. Aug. 15, 1992;89(16):7305-9). Thus, the specificity of action of a ribozyme is greater than that of an antisense oligonucleotide binding the same RNA site.

[0768] The enzymatic nucleic acid molecule may be formed in a hammerhead, hairpin, a hepatitis δ virus, group I intron or RNaseP RNA (in association with an RNA guide sequence) or Neurospora VS RNA motif. Examples of hammerhead motifs are described by Rossi et al. Nucleic Acids Res. 1992 September 11;20(17):4559-65. Examples of hairpin motifs are described by Hampel et al (Eur. Pat. Appl. Publ. No. EP 0360257), Hampel and Tritz, Biochemistry Jun. 13, 1989;28(12):4929-33; Hampel et al., Nucleic Acids Res. Jan. 25, 1990;18(2):299-304 and U.S. Pat. No. 5,631,359. An example of the hepatitis δ virus motif is described by Perrotta and Been, Biochemistry. Dec. 1, 1992;31(47):11843-52; an example of the RNaseP motif is described by Guerrier-Takada et al., Cell. 1983 December; 35(3 Pt 2):849-57; Neurospora VS RNA ribozyme motif is described by Collins (Saville and Collins, Cell. May 18, 1990;61(4):685-96; Saville and Collins, Proc Natl Acad Sci USA. Oct. 1, 1991;88(19):8826-30; Collins and Olive, Biochemistry. Mar. 23, 1993;32(11):2795-9); and an example of the Group I intron is described in (U.S. Pat. No. 4,987,071). All that is important in an enzymatic nucleic acid molecule of this invention is that it has a specific substrate binding site which is complementary to one or more of the target gene RNA regions, and that it have nucleotide sequences within or surrounding that substrate binding site which impart an RNA cleaving activity to the molecule. Thus the ribozyme constructs need not be limited to specific motifs mentioned herein.

[0769] Ribozymes may be designed as described in Int. Pat. Appl. Publ. No. WO 93/23569 and Int. Pat. Appl. Publ. No. WO 94/02595, each specifically incorporated herein by reference) and synthesized to be tested in vitro and in vivo, as described. Such ribozymes can also be optimized for delivery. While specific examples are provided, those in the art will recognize that equivalent RNA targets in other species can be utilized when necessary.

[0770] Ribozyme activity can be optimized by altering the length of the ribozyme binding arms, or chemically synthesizing ribozymes with modifications that prevent their degradation by serum ribonucleases (see e.g., Int. Pat. Appl. Publ. No. WO 92/07065; Int. Pat. Appl. Publ. No. WO 93/15187; Int. Pat. Appl. Publ. No. WO 91/03162; Eur. Pat. Appl. Publ. No. 92110298.4; U.S. Pat. No. 5,334,711; and Int. Pat. Appl. Pubi. No. WO 94/13688, which describe various chemical modifications that can be made to the sugar moieties of enzymatic RNA molecules), modifications which enhance their efficacy in cells, and removal of stem II bases to shorten RNA synthesis times and reduce chemical requirements.

[0771] Sullivan et al. (Int. Pat. Appl. Publ. No. WO 94/02595) describes the general methods for delivery of enzymatic RNA molecules. Ribozymes may be administered to cells by a variety of methods known to those familiar to the art, including, but not restricted to, encapsulation in liposomes, by iontophoresis, or by incorporation into other vehicles, such as hydrogels, cyclodextrins, biodegradable nanocapsules, and bioadhesive microspheres. For some indications, ribozymes may be directly delivered ex vivo to cells or tissues with or without the aforementioned vehicles. Alternatively, the RNA/vehicle combination may be locally delivered by direct inhalation, by direct injection or by use of a catheter, infusion pump or stent. Other routes of delivery include, but are not limited to, intravascular, intramuscular, subcutaneous or joint injection, aerosol inhalation, oral (tablet or pill form), topical, systemic, ocular, intraperitoneal and/or intrathecal delivery. More detailed descriptions of ribozyme delivery and administration are provided in Int. Pat. Appl. Publ. No. WO 94/02595 and Int. Pat. Appl. Publ. No. WO 93/23569, each specifically incorporated herein by reference.

[0772] Another means of accumulating high concentrations of a ribozyme(s) within cells is to incorporate the ribozyme-encoding sequences into a DNA expression vector. Transcription of the ribozyme sequences are driven from a promoter for eukaryotic RNA polymerase I (pol I), RNA polymerase II (pol II), or RNA polymerase III (pol III). Transcripts from pol II or pol III promoters will be expressed at high levels in all cells; the levels of a given pol II promoter in a given cell type will depend on the nature of the gene regulatory sequences (enhancers, silencers, etc.) present nearby. Prokaryotic RNA polymerase promoters may also be used, providing that the prokaryotic RNA polymerase enzyme is expressed in the appropriate cells Ribozymes expressed from such promoters have been shown to function in mammalian cells. Such transcription units can be incorporated into a variety of vectors for introduction into mammalian cells, including but not restricted to, plasmid DNA vectors, viral DNA vectors (such as adenovirus or adeno-associated vectors), or viral RNA vectors (such as retroviral, semliki forest virus, sindbis virus vectors).

[0773] In another embodiment of the invention, peptide nucleic acids (PNAs) compositions are provided. PNA is a DNA mimic in which the nucleobases are attached to a pseudopeptide backbone (Good and Nielsen, Antisense Nucleic Acid Drug Dev. 1997 7(4) 431-37). PNA is able to be utilized in a number methods that traditionally have used RNA or DNA. Often PNA sequences perform better in techniques than the corresponding RNA or DNA sequences and have utilities that are not inherent to RNA or DNA. A review of PNA including methods of making, characteristics of, and methods of using, is provided by Corey (Trends Biotechnol 1997 June; 15(6):224-9). As such, in certain embodiments, one may prepare PNA sequences that are complementary to one or more portions of the ACE mRNA sequence, and such PNA compositions may be used to regulate, alter, decrease, or reduce the translation of ACE-specific mRNA, and thereby alter the level of ACE activity in a host cell to which such PNA compositions have been administered.

[0774] PNAs have 2-aminoethyl-glycine linkages replacing the normal phosphodiester backbone of DNA (Nielsen et al., Science Dec. 6, 1991;254(5037):1497-500; Hanvey et al., Science. Nov. 27, 1992;258(5087):1481-5; Hyrup and Nielsen, Bioorg Med Chem. 1996 January; 4(1):5-23). This chemistry has three important consequences: firstly, in contrast to DNA or phosphorothioate oligonucleotides, PNAs are neutral molecules; secondly, PNAs are achiral, which avoids the need to develop a stereoselective synthesis; and thirdly, PNA synthesis uses standard Boc or Fmoc protocols for solid-phase peptide synthesis, although other methods, including a modified Merrifield method, have been used.

[0775] PNA monomers or ready-made oligomers are commercially available from PerSeptive Biosystems (Framingham, Mass.). PNA syntheses by either Boc or Fmoc protocols are straightforward using manual or automated protocols (Norton et al., Bioorg Med Chem. 1995 April; 3(4):437-45). The manual protocol lends itself to the production of chemically modified PNAs or the simultaneous synthesis of families of closely related PNAs.

[0776] As with peptide synthesis, the success of a particular PNA synthesis will depend on the properties of the chosen sequence. For example, while in theory PNAs can incorporate any combination of nucleotide bases, the presence of adjacent purines can lead to deletions of one or more residues in the product. In expectation of this difficulty, it is suggested that, in producing PNAs with adjacent purines, one should repeat the coupling of residues likely to be added inefficiently. This should be followed by the purification of PNAs by reverse-phase high-pressure liquid chromatography, providing yields and purity of product similar to those observed during the synthesis of peptides.

[0777] Modifications of PNAs for a given application may be accomplished by coupling amino acids during solid-phase synthesis or by attaching compounds that contain a carboxylic acid group to the exposed N-terminal amine. Alternatively, PNAs can be modified after synthesis by coupling to an introduced lysine or cysteine. The ease with which PNAs can be modified facilitates optimization for better solubility or for specific functional requirements. Once synthesized, the identity of PNAs and their derivatives can be confirmed by mass spectrometry. Several studies have made and utilized modifications of PNAs (for example, Norton et al, Bioorg Med Chem. 1995 April; 3(4):437-45; Petersen et al., J Pept Sci. 1995 May-June; 1(3):175-83; Orum et al., Biotechniques. 1995 September; 19(3):472-80; Footer et al., Biochemistry. Aug. 20, 1996;35(33):10673-9; Griffith et al., Nucleic Acids Res. Aug. 11, 1995;23(15):3003-8; Pardridge et al., Proc Natl Acad Sci USA. Jun. 6, 1995;92(12):5592-6; Boffa et al., Proc Natl Acad Sci USA. Mar. 14, 1995;92(6):1901-5; Gambacorti-Passerini et al., Blood. Aug. 15, 1996;88(4):1411-7; Armitage et al., Proc Natl Acad Sci USA. Nov. 11, 1997;94(23):12320-5; Seeger et al., Biotechniques. 1997 September; 23(3):512-7). U.S. Pat. No. 5,700,922 discusses PNA-DNA-PNA chimeric molecules and their uses in diagnostics, modulating protein in organisms, and treatment of conditions susceptible to therapeutics.

[0778] Methods of characterizing the antisense binding properties of PNAs are discussed in Rose (Anal Chem. Dec. 15, 1993;65(24):3545-9) and Jensen et al. (Biochemistry. Apr. 22, 1997;36(16):5072-7). Rose uses capillary gel electrophoresis to determine binding of PNAs to their complementary oligonucleotide, measuring the relative binding kinetics and stoichiometry. Similar types of measurements were made by Jensen et al. using BIAcore™ technology.

[0779] Other applications of PNAs that have been described and will be apparent to the skilled artisan include use in DNA strand invasion, antisense inhibition, mutational analysis, enhancers of transcription, nucleic acid purification, isolation of transcriptionally active genes, blocking of transcription factor binding, genome cleavage, biosensors, in situ hybridization, and the like.

[0780] Polvnucleotide Identification, Characterization and Expression

[0781] Polynucleotide compositions of the present invention may be identified, prepared and/or manipulated using any of a variety of well established techniques (see generally, Sambrook et al., Molecular Cloning: A Laboratory Manual, Cold Spring Harbor Laboratories, Cold Spring Harbor, N.Y., 1989, and other like references). For example, a polynucleotide may be identified, as described in more detail below, by screening a microarray of cDNAs for tumor-associated expression (i.e., expression that is at least two fold greater in a tumor than in normal tissue, as determined using a representative assay provided herein). Such screens may be performed, for example, using the microarray technology of Affymetrix, Inc. (Santa Clara, Calif.) according to the manufacturer's instructions (and essentially as described by Schena et al., Proc. Natl. Acad Sci. USA 93:10614-10619, 1996 and Heller et al., Proc. Natl. Acad. Sci. USA 94:2150-2155, 1997). Alternatively, polynucleotides may be amplified from cDNA prepared from cells expressing the proteins described herein, such as tumor cells.

[0782] Many template dependent processes are available to amplify a target sequences of interest present in a sample. One of the best known amplification methods is the polymerase chain reaction (PCR™) which is described in detail in U.S. Pat. Nos. 4,683,195, 4,683,202 and 4,800,159, each of which is incorporated herein by reference in its entirety. Briefly, in PCR™, two primer sequences are prepared which are complementary to regions on opposite complementary strands of the target sequence. An excess of deoxynucleoside triphosphates is added to a reaction mixture along with a DNA polymerase (e.g., Taq polymerase). If the target sequence is present in a sample, the primers will bind to the target and the polymerase will cause the primers to be extended along the target sequence by adding on nucleotides. By raising and lowering the temperature of the reaction mixture, the extended primers will dissociate from the target to form reaction products, excess primers will bind to the target and to the reaction product and the process is repeated. Preferably reverse transcription and PCR™ amplification procedure may be performed in order to quantify the amount of mRNA amplified. Polymerase chain reaction methodologies are well known in the art.

[0783] Any of a number of other template dependent processes, many of which are variations of the PCR™ amplification technique, are readily known and available in the art. Illustratively, some such methods include the ligase chain reaction (referred to as LCR), described, for example, in Eur. Pat. Appl. Publ. No. 320,308 and U.S. Pat. No. 4,883,750; Qbeta Replicase, described in PCT Intl. Pat. Appl. Publ. No. PCT/US87/00880; Strand Displacement Amplification (SDA) and Repair Chain Reaction (RCR). Still other amplification methods are described in Great Britain Pat. Appl. No. 2 202 328, and in PCT Intl. Pat. Appl. Publ. No. PCT/US89/01025. Other nucleic acid amplification procedures include transcription-based amplification systems (TAS) (PCT Intl. Pat. Appl. Publ. No. WO 88/10315), including nucleic acid sequence based amplification (NASBA) and 3SR. Eur. Pat. Appl. Publ. No. 329,822 describes a nucleic acid amplification process involving cyclically synthesizing single-stranded RNA (“ssRNA”), ssDNA, and double-stranded DNA (dsDNA). PCT Intl. Pat. Appl. Publ. No. WO 89/06700 describes a nucleic acid sequence amplification scheme based on the hybridization of a promoter/primer sequence to a target single-stranded DNA (“ssDNA”) followed by transcription of many RNA copies of the sequence. Other amplification methods such as “RACE” (Frohman, 1990), and “one-sided PCR” (Ohara, 1989) are also well-known to those of skill in the art.

[0784] An amplified portion of a polynucleotide of the present invention may be used to isolate a full length gene from a suitable library (e.g., a tumor cDNA library) using well known techniques. Within such techniques, a library (cDNA or genomic) is screened using one or more polynucleotide probes or primers suitable for amplification. Preferably, a library is size-selected to include larger molecules. Random primed libraries may also be preferred for identifying 5′ and upstream regions of genes. Genomic libraries are preferred for obtaining introns and extending 5′ sequences.

[0785] For hybridization techniques, a partial sequence may be labeled (e.g., by nick-translation or end-labeling with ³²P) using well known techniques. A bacterial or bacteriophage library is then generally screened by hybridizing filters containing denatured bacterial colonies (or lawns containing phage plaques) with the labeled probe (see Sambrook et al., Molecular Cloning: A Laboratory Manual, Cold Spring Harbor Laboratories, Cold Spring Harbor, N.Y., 1989). Hybridizing colonies or plaques are selected and expanded, and the DNA is isolated for further analysis. cDNA clones may be analyzed to determine the amount of additional sequence by, for example, PCR using a primer from the partial sequence and a primer from the vector. Restriction maps and partial sequences may be generated to identify one or more overlapping clones. The complete sequence may then be determined using standard techniques, which may involve generating a series of deletion clones. The resulting overlapping sequences can then assembled into a single contiguous sequence. A full length cDNA molecule can be generated by ligating suitable fragments, using well known techniques.

[0786] Alternatively, amplification techniques, such as those described above, can be useful for obtaining a full length coding sequence from a partial cDNA sequence. One such amplification technique is inverse PCR (see Triglia et al., Nucl. Acids Res. 16:8186, 1988), which uses restriction enzymes to generate a fragment in the known region of the gene. The fragment is then circularized by intramolecular ligation and used as a template for PCR with divergent primers derived from the known region. Within an alternative approach, sequences adjacent to a partial sequence may be retrieved by amplification with a primer to a linker sequence and a primer specific to a known region. The amplified sequences are typically subjected to a second round of amplification with the same linker primer and a second primer specific to the known region. A variation on this procedure, which employs two primers that initiate extension in opposite directions from the known sequence, is described in WO 96/38591. Another such technique is known as “rapid amplification of cDNA ends” or RACE. This technique involves the use of an internal primer and an external primer, which hybridizes to a polyA region or vector sequence, to identify sequences that are 5′ and 3′ of a known sequence. Additional techniques include capture PCR (Lagerstrom et al., PCR Methods Applic. 1:111-19, 1991) and walking PCR (Parker et al., Nucl. Acids. Res. 19:3055-60, 1991). Other methods employing amplification may also be employed to obtain a full length cDNA sequence.

[0787] In certain instances, it is possible to obtain a full length cDNA sequence by analysis of sequences provided in an expressed sequence tag (EST) database, such as that available from GenBank. Searches for overlapping ESTs may generally be performed using well known programs (e.g., NCBI BLAST searches), and such ESTs may be used to generate a contiguous full length sequence. Full length DNA sequences may also be obtained by analysis of genomic fragments.

[0788] In other embodiments of the invention, polynucleotide sequences or fragments thereof which encode polypeptides of the invention, or fusion proteins or functional equivalents thereof, may be used in recombinant DNA molecules to direct expression of a polypeptide in appropriate host cells. Due to the inherent degeneracy of the genetic code, other DNA sequences that encode substantially the same or a functionally equivalent amino acid sequence may be produced and these sequences may be used to clone and express a given polypeptide.

[0789] As will be understood by those of skill in the art, it may be advantageous in some instances to produce polypeptide-encoding nucleotide sequences possessing non-naturally occurring codons. For example, codons preferred by a particular prokaryotic or eukaryotic host can be selected to increase the rate of protein expression or to produce a recombinant RNA transcript having desirable properties, such as a half-life which is longer than that of a transcript generated from the naturally occurring sequence.

[0790] Moreover, the polynucleotide sequences of the present invention can be engineered using methods generally known in the art in order to alter polypeptide encoding sequences for a variety of reasons, including but not limited to, alterations which modify the cloning, processing, and/or expression of the gene product. For example, DNA shuffling by random fragmentation and PCR reassembly of gene fragments and synthetic oligonucleotides may be used to engineer the nucleotide sequences. In addition, site-directed mutagenesis may be used to insert new restriction sites, alter glycosylation patterns, change codon preference, produce splice variants, or introduce mutations, and so forth.

[0791] In another embodiment of the invention, natural, modified, or recombinant nucleic acid sequences may be ligated to a heterologous sequence to encode a fusion protein. For example, to screen peptide libraries for inhibitors of polypeptide activity, it may be useful to encode a chimeric protein that can be recognized by a commercially available antibody. A fusion protein may also be engineered to contain a cleavage site located between the polypeptide-encoding sequence and the heterologous protein sequence, so that the polypeptide may be cleaved and purified away from the heterologous moiety.

[0792] Sequences encoding a desired polypeptide may be synthesized, in whole or in part, using chemical methods well known in the art (see Caruthers, M. H. et al. (1980) Nucl. Acids Res. Symp. Ser. 215-223, Horn, T. et al. (1980) Nucl. Acids Res. Symp. Ser. 225-232). Alternatively, the protein itself may be produced using chemical methods to synthesize the amino acid sequence of a polypeptide, or a portion thereof. For example, peptide synthesis can be performed using various solid-phase techniques (Roberge, J. Y. et al. (1995) Science 269:202-204) and automated synthesis may be achieved, for example, using the ABI 431A Peptide Synthesizer (Perkin Elmer, Palo Alto, Calif.).

[0793] A newly synthesized peptide may be substantially purified by preparative high performance liquid chromatography (e.g., Creighton, T. (1983) Proteins, Structures and Molecular Principles, W H Freeman and Co., New York, N.Y.) or other comparable techniques available in the art. The composition of the synthetic peptides may be confirmed by amino acid analysis or sequencing (e.g., the Edman degradation procedure). Additionally, the amino acid sequence of a polypeptide, or any part thereof, may be altered during direct synthesis and/or combined using chemical methods with sequences from other proteins, or any part thereof, to produce a variant polypeptide.

[0794] In order to express a desired polypeptide, the nucleotide sequences encoding the polypeptide, or functional equivalents, may be inserted into appropriate expression vector, i.e., a vector which contains the necessary elements for the transcription and translation of the inserted coding sequence. Methods which are well known to those skilled in the art may be used to construct expression vectors containing sequences encoding a polypeptide of interest and appropriate transcriptional and translational control elements. These methods include in vitro recombinant DNA techniques, synthetic techniques, and in vivo genetic recombination. Such techniques are described, for example, in Sambrook, J. et al. (1989) Molecular Cloning, A Laboratory Manual, Cold Spring Harbor Press, Plainview, N.Y., and Ausubel, F. M. et al. (1989) Current Protocols in Molecular Biology, John Wiley & Sons, New York. N.Y.

[0795] A variety of expression vector/host systems may be utilized to contain and express polynucleotide sequences. These include, but are not limited to, microorganisms such as bacteria transformed with recombinant bacteriophage, plasmid, or cosmid DNA expression vectors; yeast transformed with yeast expression vectors; insect cell systems infected with virus expression vectors (e.g., baculovirus); plant cell systems transformed with virus expression vectors (e.g., cauliflower mosaic virus, CaMV; tobacco mosaic virus, TMV) or with bacterial expression vectors (e.g., Ti or pBR322 plasmids); or animal cell systems.

[0796] The “control elements” or “regulatory sequences” present in an expression vector are those non-translated regions of the vector--enhancers, promoters, 5′ and 3′ untranslated regions—which interact with host cellular proteins to carry out transcription and translation. Such elements may vary in their strength and specificity. Depending on the vector system and host utilized, any number of suitable transcription and translation elements, including constitutive and inducible promoters, may be used. For example, when cloning in bacterial systems, inducible promoters such as the hybrid lacZ promoter of the PBLUESCRIPT phagemid (Stratagene, La Jolla, Calif.) or PSPORT1 plasmid (Gibco BRL, Gaithersburg, Md.) and the like may be used. In mammalian cell systems, promoters from mammalian genes or from mammalian viruses are generally preferred. If it is necessary to generate a cell line that contains multiple copies of the sequence encoding a polypeptide, vectors based on SV40 or EBV may be advantageously used with an appropriate selectable marker.

[0797] In bacterial systems, any of a number of expression vectors may be selected depending upon the use intended for the expressed polypeptide. For example, when large quantities are needed, for example for the induction of antibodies, vectors which direct high level expression of fusion proteins that are readily purified may be used. Such vectors include, but are not limited to, the multifunctional E. coli cloning and expression vectors such as BLUESCRIPT (Stratagene), in which the sequence encoding the polypeptide of interest may be ligated into the vector in frame with sequences for the amino-terminal Met and the subsequent 7 residues of .beta.-galactosidase so that a hybrid protein is produced; pIN vectors (Van Heeke, G. and S. M. Schuster (1989) J. Biol. Chem. 264:5503-5509); and the like. pGEX Vectors (Promega, Madison, Wis.) may also be used to express foreign polypeptides as fusion proteins with glutathione S-transferase (GST). In general, such fusion proteins are soluble and can easily be purified from lysed cells by adsorption to glutathione-agarose beads followed by elution in the presence of free glutathione. Proteins made in such systems may be designed to include heparin, thrombin, or factor XA protease cleavage sites so that the cloned polypeptide of interest can be released from the GST moiety at will.

[0798] In the yeast, Saccharomyces cerevisiae, a number of vectors containing constitutive or inducible promoters such as alpha factor, alcohol oxidase, and PGH may be used. For reviews, see Ausubel et al. (supra) and Grant et al. (1987) Methods Enzymol. 153:516-544.

[0799] In cases where plant expression vectors are used, the expression of sequences encoding polypeptides may be driven by any of a number of promoters. For example, viral promoters such as the 35S and 19S promoters of CaMV may be used alone or in combination with the omega leader sequence from TMV (Takamatsu, N. (1987) EMBO J. 6:307-311. Alternatively, plant promoters such as the small subunit of RUBISCO or heat shock promoters may be used (Coruzzi, G. et al. (1984) EMBO J. 3:1671-1680; Broglie, R. et al. (1984) Science 224:838-843; and Winter, J. et al. (1991) Results Probl. Cell Differ. 17:85-105). These constructs can be introduced into plant cells by direct DNA transformation or pathogen-mediated transfection. Such techniques are described in a number of generally available reviews (see, for example, Hobbs, S. or Murry, L. E. in McGraw Hill Yearbook of Science and Technology (1992) McGraw Hill, New York, N.Y.; pp. 191-196).

[0800] An insect system may also be used to express a polypeptide of interest. For example, in one such system, Autographa californica nuclear polyhedrosis virus (AcNPV) is used as a vector to express foreign genes in Spodoptera frugiperda cells or in Trichoplusia larvae. The sequences encoding the polypeptide may be cloned into a non-essential region of the virus, such as the polyhedrin gene, and placed under control of the polyhedrin promoter. Successful insertion of the polypeptide-encoding sequence will render the polyhedrin gene inactive and produce recombinant virus lacking coat protein. The recombinant viruses may then be used to infect, for example, S. frugiperda cells or Trichoplusia larvae in which the polypeptide of interest may be expressed (Engelhard, E. K. et al. (1994) Proc. Natl. Acad. Sci. 91 :3224-3227).

[0801] In mammalian host cells, a number of viral-based expression systems are generally available. For example, in cases where an adenovirus is used as an expression vector, sequences encoding a polypeptide of interest may be ligated into an adenovirus transcription/translation complex consisting of the late promoter and tripartite leader sequence. Insertion in a non-essential E1 or E3 region of the viral genome may be used to obtain a viable virus which is capable of expressing the polypeptide in infected host cells (Logan, J. and Shenk, T. (1984) Proc. Natl. Acad. Sci. 81:3655-3659). In addition, transcription enhancers, such as the Rous sarcoma virus (RSV) enhancer, may be used to increase expression in mammalian host cells.

[0802] Specific initiation signals may also be used to achieve more efficient translation of sequences encoding a polypeptide of interest. Such signals include the ATG initiation codon and adjacent sequences. In cases where sequences encoding the polypeptide, its initiation codon, and upstream sequences are inserted into the appropriate expression vector, no additional transcriptional or translational control signals may be needed. However, in cases where only coding sequence, or a portion thereof, is inserted, exogenous translational control signals including the ATG initiation codon should be provided. Furthermore, the initiation codon should be in the correct reading frame to ensure translation of the entire insert. Exogenous translational elements and initiation codons may be of various origins, both natural and synthetic. The efficiency of expression may be enhanced by the inclusion of enhancers which are appropriate for the particular cell system which is used, such as those described in the literature (Scharf, D. et al. (1994) Results Probl. Cell Differ. 20:125-162).

[0803] In addition, a host cell strain may be chosen for its ability to modulate the expression of the inserted sequences or to process the expressed protein in the desired fashion. Such modifications of the polypeptide include, but are not limited to, acetylation, carboxylation. glycosylation, phosphorylation, lipidation, and acylation. Post-translational processing which cleaves a “prepro” form of the protein may also be used to facilitate correct insertion, folding and/or function. Different host cells such as CHO, COS, HeLa, MDCK, HEK293, and WI38, which have specific cellular machinery and characteristic mechanisms for such post-translational activities, may be chosen to ensure the correct modification and processing of the foreign protein.

[0804] For long-term, high-yield production of recombinant proteins, stable expression is generally preferred. For example, cell lines which stably express a polynucleotide of interest may be transformed using expression vectors which may contain viral origins of replication and/or endogenous expression elements and a selectable marker gene on the same or on a separate vector. Following the introduction of the vector, cells may be allowed to grow for 1-2 days in an enriched media before they are switched to selective media. The purpose of the selectable marker is to confer resistance to selection, and its presence allows growth and recovery of cells which successfully express the introduced sequences. Resistant clones of stably transformed cells may be proliferated using tissue culture techniques appropriate to the cell type.

[0805] Any number of selection systems may be used to recover transformed cell lines. These include, but are not limited to, the herpes simplex virus thymidine kinase (Wigler, M. et al. (1977) Cell 11:223-32) and adenine phosphoribosyltransferase (Lowy, I. et al. (1990) Cell 22:817-23) genes which can be employed in tk.sup.- or aprt.sup.-cells, respectively. Also, antimetabolite, antibiotic or herbicide resistance can be used as the basis for selection; for example, dhfr which confers resistance to methotrexate (Wigler, M. et al. (1980) Proc. Natl. Acad. Sci. 77:3567-70); npt, which confers resistance to the aminoglycosides, neomycin and G-418 (Colbere-Garapin, F. et al (1981) J. Mol. Biol. 150:1-14); and als or pat, which confer resistance to chlorsulfuron and phosphinotricin acetyltransferase, respectively (Murry, supra). Additional selectable genes have been described, for example, trpB, which allows cells to utilize indole in place of tryptophan, or hisD, which allows cells to utilize histinol in place of histidine (Hartman, S. C. and R. C. Mulligan (1988) Proc. Natl. Acad. Sci. 85:8047-51). The use of visible markers has gained popularity with such markers as anthocyanins, beta-glucuronidase and its substrate GUS, and luciferase and its substrate luciferin, being widely used not only to identify transformants, but also to quantify the amount of transient or stable protein expression attributable to a specific vector system (Rhodes, C. A. et al. (1995) Methods Mol. Biol. 55:121-131).

[0806] Although the presence/absence of marker gene expression suggests that the gene of interest is also present, its presence and expression may need to be confirmed. For example, if the sequence encoding a polypeptide is inserted within a marker gene sequence, recombinant cells containing sequences can be identified by the absence of marker gene function. Alternatively, a marker gene can be placed in tandem with a polypeptide-encoding sequence under the control of a single promoter. Expression of the marker gene in response to induction or selection usually indicates expression of the tandem gene as well.

[0807] Alternatively, host cells that contain and express a desired polynucleotide sequence may be identified by a variety of procedures known to those of skill in the art. These procedures include, but are not limited to, DNA-DNA or DNA-RNA hybridizations and protein bioassay or immunoassay techniques which include, for example, membrane, solution, or chip based technologies for the detection and/or quantification of nucleic acid or protein.

[0808] A variety of protocols for detecting and measuring the expression of polynucleotide-encoded products, using either polyclonal or monoclonal antibodies specific for the product are known in the art. Examples include enzyme-linked immunosorbent assay (ELISA), radioimmunoassay (RIA), and fluorescence activated cell sorting (FACS). A two-site, monoclonal-based immunoassay utilizing monoclonal antibodies reactive to two non-interfering epitopes on a given polypeptide may be preferred for some applications, but a competitive binding assay may also be employed. These and other assays are described, among other places, in Hampton, R. et al. (1990; Serological Methods, a Laboratory Manual, APS Press, St Paul. Minn.) and Maddox, D. E. et al. (1983; J. Exp. Med. 158:1211-1216).

[0809] A wide variety of labels and conjugation techniques are known by those skilled in the art and may be used in various nucleic acid and amino acid assays. Means for producing labeled hybridization or PCR probes for detecting sequences related to polynucleotides include oligolabeling, nick translation, end-labeling or PCR amplification using a labeled nucleotide. Alternatively, the sequences, or any portions thereof may be cloned into a vector for the production of an mRNA probe. Such vectors are known in the art, are commercially available, and may be used to synthesize RNA probes in vitro by addition of an appropriate RNA polymerase such as T7, T3, or SP6 and labeled nucleotides. These procedures may be conducted using a variety of commercially available kits. Suitable reporter molecules or labels, which may be used include radionuclides, enzymes, fluorescent, chemiluminescent, or chromogenic agents as well as substrates, cofactors, inhibitors, magnetic particles, and the like.

[0810] Host cells transformed with a polynucleotide sequence of interest may be cultured under conditions suitable for the expression and recovery of the protein from cell culture. The protein produced by a recombinant cell may be secreted or contained intracellularly depending on the sequence and/or the vector used. As will be understood by those of skill in the art, expression vectors containing polynucleotides of the invention may be designed to contain signal sequences which direct secretion of the encoded polypeptide through a prokaryotic or eukaryotic cell membrane. Other recombinant constructions may be used to join sequences encoding a polypeptide of interest to nucleotide sequence encoding a polypeptide domain which will facilitate purification of soluble proteins. Such purification facilitating domains include, but are not limited to, metal chelating peptides such as histidine-tryptophan modules that allow purification on immobilized metals, protein A domains that allow purification on immobilized immunoglobulin, and the domain utilized in the FLAGS extension/affinity purification system (Immunex Corp., Seattle, Wash.). The inclusion of cleavable linker sequences such as those specific for Factor XA or enterokinase (Invitrogen. San Diego, Calif.) between the purification domain and the encoded polypeptide may be used to facilitate purification. One such expression vector provides for expression of a fusion protein containing a polypeptide of interest and a nucleic acid encoding 6 histidine residues preceding a thioredoxin or an enterokinase cleavage site. The histidine residues facilitate purification on IMIAC (immobilized metal ion affinity chromatography) as described in Porath, J. et al. (1992, Prot. Exp. Purif. 3:263-281) while the enterokinase cleavage site provides a means for purifying the desired polypeptide from the fusion protein. A discussion of vectors which contain fusion proteins is provided in Kroll, D. J. et al. (1993; DNA Cell Biol. 12:441-453).

[0811] In addition to recombinant production methods, polypeptides of the invention, and fragments thereof, may be produced by direct peptide synthesis using solid-phase techniques (Merrifield J. (1963) J. Am. Chem. Soc. 85:2149-2154). Protein synthesis may be performed using manual techniques or by automation. Automated synthesis may be achieved, for example, using Applied Biosystems 431A Peptide Synthesizer (Perkin Elmer). Alternatively, various fragments may be chemically synthesized separately and combined using chemical methods to produce the full length molecule.

[0812] Antibody Compositions Fragments Thereof and Other Binding Agents

[0813] According to another aspect, the present invention further provides binding agents, such as antibodies and antigen-binding fragments thereof, that exhibit immunological binding to a tumor polypeptide disclosed herein, or to a portion, variant or derivative thereof. An antibody, or antigen-binding fragment thereof, is said to “specifically bind,” “immunogically bind,” and/or is “immunologically reactive” to a polypeptide of the invention if it reacts at a detectable level (within, for example, an ELISA assay) with the polypeptide, and does not react detectably with unrelated polypeptides under similar conditions.

[0814] Immunological binding, as used in this context, generally refers to the non-covalent interactions of the type which occur between an immunoglobulin molecule and an antigen for which the immunoglobulin is specific. The strength, or affinity of immunological binding interactions can be expressed in terms of the dissociation constant (K_{d}) of the interaction, wherein a smaller K_{d} represents a greater affinity. Immunological binding properties of selected polypeptides can be quantified using methods well known in the art. One such method entails measuring the rates of antigen-binding site/antigen complex formation and dissociation, wherein those rates depend on the concentrations of the complex partners, the affinity of the interaction, and on geometric parameters that equally influence the rate in both directions. Thus, both the “on rate constant” (Kₒₙ) and the “off rate constant” (K_{off}) can be determined by calculation of the concentrations and the actual rates of association and dissociation. The ratio of K_{off}/Kₒₙ enables cancellation of all parameters not related to affinity, and is thus equal to the dissociation constant K_{d}. See, generally, Davies et al. (1990) Annual Rev. Biochem. 59:439-473.

[0815] An “antigen-binding site,” or “binding portion” of an antibody refers to the part of the immunoglobulin molecule that participates in antigen binding. The antigen binding site is formed by amino acid residues of the N-terminal variable (“V”) regions of the heavy (“H”) and light (“L”) chains. Three highly divergent stretches within the V regions of the heavy and light chains are referred to as “hypervariable regions” which are interposed between more conserved flanking stretches known as “framework regions,” or “FRs”. Thus the term “FR” refers to amino acid sequences which are naturally found between and adjacent to hypervariable regions in immunoglobulins. In an antibody molecule, the three hypervariable regions of a light chain and the three hypervariable regions of a heavy chain are disposed relative to each other in three dimensional space to form an antigen-binding surface. The antigen-binding surface is complementary to the three-dimensional surface of a bound antigen, and the three hypervariable regions of each of the heavy and light chains are referred to as “complementarity-determining regions,” or “CDRs.”

[0816] Binding agents may be further capable of differentiating between patients with and without a cancer, such as prostate cancer, using the representative assays provided herein. For example, antibodies or other binding agents that bind to a tumor protein will preferably generate a signal indicating the presence of a cancer in at least about 20% of patients with the disease, more preferably at least about 30% of patients. Alternatively, or in addition, the antibody will generate a negative signal indicating the absence of the disease in at least about 90% of individuals without the cancer. To determine whether a binding agent satisfies this requirement, biological samples (e.g., blood, sera, sputum, urine and/or tumor biopsies) from patients with and without a cancer (as determined using standard clinical tests) may be assayed as described herein for the presence of polypeptides that bind to the binding agent. Preferably, a statistically significant number of samples with and without the disease will be assayed. Each binding agent should satisfy the above criteria; however, those of ordinary skill in the art will recognize that binding agents may be used in combination to improve sensitivity.

[0817] Any agent that satisfies the above requirements may be a binding agent. For example, a binding agent may be a ribosome, with or without a peptide component, an RNA molecule or a polypeptide. In a preferred embodiment, a binding agent is an antibody or an antigen-binding fragment thereof. Antibodies may be prepared by any of a variety of techniques known to those of ordinary skill in the art See, e.g., Harlow and Lane, Antibodies: A Laboratory Manual, Cold Spring Harbor Laboratory, 1988. In general, antibodies can be produced by cell culture techniques, including the generation of monoclonal antibodies as described herein, or via transfection of antibody genes into suitable bacterial or mammalian cell hosts, in order to allow for the production of recombinant antibodies. In one technique, an immunogen comprising the polypeptide is initially injected into any of a wide variety of mammals (e.g., mice, rats, rabbits, sheep or goats). In this step, the polypeptides of this invention may serve as the immunogen without modification. Alternatively, particularly for relatively short polypeptides, a superior immune response may be elicited if the polypeptide is joined to a carrier protein, such as bovine serum albumin or keyhole limpet hemocyanin. The immunogen is injected into the animal host, preferably according to a predetermined schedule incorporating one or more booster immunizations, and the animals are bled periodically. Polyclonal antibodies specific for the polypeptide may then be purified from such antisera by, for example, affinity chromatography using the polypeptide coupled to a suitable solid support.

[0818] Monoclonal antibodies specific for an antigenic polypeptide of interest may be prepared, for example, using the technique of Kohler and Milstein, Eur. J. Immunol 6:511-519, 1976, and improvements thereto. Briefly, these methods involve the preparation of immortal cell lines capable of producing antibodies having the desired specificity (i.e., reactivity with the polypeptide of interest). Such cell lines may be produced, for example, from spleen cells obtained from an animal immunized as described above. The spleen cells are then immortalized by, for example, fusion with a myeloma cell fusion partner, preferably one that is syngeneic with the immunized animal. A variety of fusion techniques may be employed. For example, the spleen cells and myeloma cells may be combined with a nonionic detergent for a few minutes and then plated at low density on a selective medium that supports the growth of hybrid cells, but not myeloma cells. A preferred selection technique uses HAT (hypoxanthine, aminopterin, thymidine) selection. After a sufficient time, usually about 1 to 2 weeks, colonies of hybrids are observed. Single colonies are selected and their culture supernatants tested for binding activity against the polypeptide. Hybridomas having high reactivity and specificity are preferred.

[0819] Monoclonal antibodies may be isolated from the supernatants of growing hybridoma colonies. In addition, various techniques may be employed to enhance the yield, such as injection of the hybridoma cell line into the peritoneal cavity of a suitable vertebrate host, such as a mouse. Monoclonal antibodies may then be harvested from the ascites fluid or the blood. Contaminants may be removed from the antibodies by conventional techniques, such as chromatography, gel filtration, precipitation, and extraction. The polypeptides of this invention may be used in the purification process in, for example, an affinity chromatography step.

[0820] A number of therapeutically useful molecules are known in the art which comprise antigen-binding sites that are capable of exhibiting immunological binding properties of an antibody molecule. The proteolytic enzyme papain preferentially cleaves IgG molecules to yield several fragments, two of which (the “F(ab)” fragments) each comprise a covalent heterodimer that includes an intact antigen-binding site. The enzyme pepsin is able to cleave IgG molecules to provide several fragments, including the “F(ab′)₂” fragment which comprises both antigen-binding sites. An “Fv” fragment can be produced by preferential proteolytic cleavage of an IgM, and on rare occasions IgG or IgA immunoglobulin molecule. Fv fragments are, however, more commonly derived using recombinant techniques known in the art. The Fv fragment includes a non-covalent V_{H}::V_{L} heterodimer including an antigen-binding site which retains much of the antigen recognition and binding capabilities of the native antibody molecule. Inbar et al. (1972) Proc. Nat. Acad. Sci. USA 69:2659-2662; Hochman et al. (1976) Biochem 15:2706-2710; and Ehrlich et al. (1980) Biochem 19:4091-4096.

[0821] A single chain Fv (“sFv”) polypeptide is a covalently linked V_{H}::V_{L} heterodimer which is expressed from a gene fusion including V_{H}- and V_{L}-encoding genes linked by a peptide-encoding linker. Huston et al. (1988) Proc. Nat. Acad. Sci. USA 85(16):5879-5883. A number of methods have been described to discern chemical structures for converting the naturally aggregated—but chemically separated—light and heavy polypeptide chains from an antibody V region into an sFv molecule which will fold into a three dimensional structure substantially similar to the structure of an antigen-binding site. See, e.g., U.S. Pat. Nos. 5,091,513 and 5,132,405, to Huston et al.; and U.S. Pat. No. 4,946,778, to Ladner et al.

[0822] Each of the above-described molecules includes a heavy chain and a light chain CDR set, respectively interposed between a heavy chain and a light chain FR set which provide support to the CDRS and define the spatial relationship of the CDRs relative to each other. As used herein, the term “CDR set” refers to the three hypervariable regions of a heavy or light chain V region. Proceeding from the N-terminus of a heavy or light chain, these regions are denoted as “CDR1,” “CDR2,” and “CDR3” respectively. An antigen-binding site, therefore, includes six CDRs, comprising the CDR set from each of a heavy and a light chain V region. A polypeptide comprising a single CDR, (e.g., a CDR1, CDR2 or CDR3) is referred to herein as a “molecular recognition unit.” Crystallographic analysis of a number of antigen-antibody complexes has demonstrated that the amino acid residues of CDRs form extensive contact with bound antigen, wherein the most extensive antigen contact is with the heavy chain CDR3. Thus, the molecular recognition units are primarily responsible for the specificity of an antigen-binding site.

[0823] As used herein, the term “FR set” refers to the four flanking amino acid sequences which frame the CDRs of a CDR set of a heavy or light chain V region. Some FR residues may contact bound antigen; however, FRs are primarily responsible for folding the V region into the antigen-binding site, particularly the FR residues directly adjacent to the CDRS. Within FRs, certain amino residues and certain structural features are very highly conserved. In this regard, all V region sequences contain an internal disulfide loop of around 90 amino acid residues. When the V regions fold into a binding-site, the CDRs are displayed as projecting loop motifs which form an antigen-binding surface. It is generally recognized that there are conserved structural regions of FRs which influence the folded shape of the CDR loops into certain “canonical” structures—regardless of the precise CDR amino acid sequence. Further, certain FR residues are known to participate in non-covalent interdomain contacts which stabilize the interaction of the antibody heavy and light chains.

[0824] A number of “humanized” antibody molecules comprising an antigen-binding site derived from a non-human immunoglobulin have been described, including chimeric antibodies having rodent V regions and their associated CDRs fused to human constant domains (Winter et al. (1991) Nature 349:293-299; Lobuglio et al. (1989) Proc. Nat. Acad. Sci. USA 86:4220-4224; Shaw et al. (1987) J Immunol. 138:4534-4538; and Brown et al. (1987) Cancer Res. 47:3577-3583), rodent CDRs grafted into a human supporting FR prior to fusion with an appropriate human antibody constant domain (Riechmann et al. (1988) Nature 332:323-327; Verhoeyen et al. (1988) Science 239:1534-1536; and Jones et al. (1986) Nature 321:522-525), and rodent CDRs supported by recombinantly veneered rodent FRs (European Patent Publication No. 519,596, published Dec. 23, 1992). These “humanized” molecules are designed to minimize unwanted immunological response toward rodent antihuman antibody molecules which limits the duration and effectiveness of therapeutic applications of those moieties in human recipients.

[0825] As used herein, the terms “veneered FRs” and “recombinantly veneered FRs” refer to the selective replacement of FR residues from, e.g., a rodent heavy or light chain V region, with human FR residues in order to provide a xenogeneic molecule comprising an antigen-binding site which retains substantially all of the native FR polypeptide folding structure. Veneering techniques are based on the understanding that the ligand binding characteristics of an antigen-binding site are determined primarily by the structure and relative disposition of the heavy and light chain CDR sets within the antigen-binding surface. Davies et al. (1990) Ann. Rev. Biochem. 59:439-473. Thus, antigen binding specificity can be preserved in a humanized antibody only wherein the CDR structures, their interaction with each other, and their interaction with the rest of the V region domains are carefully maintained. By using veneering techniques, exterior (e.g., solvent-accessible) FR residues which are readily encountered by the immune system are selectively replaced with human residues to provide a hybrid molecule that comprises either a weakly immunogenic, or substantially non-immunogenic veneered surface.

[0826] The process of veneering makes use of the available sequence data for human antibody variable domains compiled by Kabat et al., in Sequences of Proteins of Immunological Interest, 4th ed., (U.S. Dept. of Health and Human Services, U.S. Government Printing Office, 1987), updates to the Kabat database, and other accessible U.S. and foreign databases (both nucleic acid and protein). Solvent accessibilities of V region amino acids can be deduced from the known three-dimensional structure for human and murine antibody fragments. There are two general steps in veneering a murine antigen-binding site. Initially, the FRs of the variable domains of an antibody molecule of interest are compared with corresponding FR sequences of human variable domains obtained from the above-identified sources. The most homologous human V regions are then compared residue by residue to corresponding murine amino acids. The residues in the murine FR which differ from the human counterpart are replaced by the residues present in the human moiety using recombinant techniques well known in the art. Residue switching is only carried out with moieties which are at least partially exposed (solvent accessible), and care is exercised in the replacement of amino acid residues which may have a significant effect on the tertiary structure of V region domains, such as proline, glycine and charged amino acids.

[0827] In this manner, the resultant “veneered” murine antigen-binding sites are thus designed to retain the murine CDR residues, the residues substantially adjacent to the CDRs, the residues identified as buried or mostly buried (solvent inaccessible), the residues believed to participate in non-covalent (e.g., electrostatic and hydrophobic) contacts between heavy and light chain domains, and the residues from conserved structural regions of the FRs which are believed to influence the “canonical” tertiary structures of the CDR loops. These design criteria are then used to prepare recombinant nucleotide sequences which combine the CDRs of both the heavy and light chain of a murine antigen-binding site into human-appearing FRs that can be used to transfect mammalian cells for the expression of recombinant human antibodies which exhibit the antigen specificity of the murine antibody molecule.

[0828] In another embodiment of the invention, monoclonal antibodies of the present invention may be coupled to one or more therapeutic agents. Suitable agents in this regard include radionuclides, differentiation inducers, drugs, toxins, and derivatives thereof. Preferred radionuclides include ⁹⁰Y, ¹²³I, ¹²⁵I, ¹³¹I, ¹⁸⁶Re, ¹⁸⁸Re, ²¹¹At, and ²¹²Bi. Preferred drugs include methotrexate, and pyrimidine and purine analogs. Preferred differentiation inducers include phorbol esters and butyric acid. Preferred toxins include ricin, abrin, diptheria toxin, cholera toxin, gelonin, Pseudomonas exotoxin, Shigella toxin, and pokeweed antiviral protein.

[0829] A therapeutic agent may be coupled (e.g., covalently bonded) to a suitable monoclonal antibody either directly or indirectly (e.g., via a linker group). A direct reaction between an agent and an antibody is possible when each possesses a substituent capable of reacting with the other. For example, a nucleophilic group, such as an amino or sulfhydryl group, on one may be capable of reacting with a carbonyl-containing group, such as an anhydride or an acid halide, or with an alkyl group containing a good leaving group (e.g., a halide) on the other.

[0830] Alternatively, it may be desirable to couple a therapeutic agent and an antibody via a linker group. A linker group can function as a spacer to distance an antibody from an agent in order to avoid interference with binding capabilities. A linker group can also serve to increase the chemical reactivity of a substituent on an agent or an antibody, and thus increase the coupling efficiency. An increase in chemical reactivity may also facilitate the use of agents, or functional groups on agents, which otherwise would not be possible.

[0831] It will be evident to those skilled in the art that a variety of biflnctional or polyfunctional reagents, both homo- and hetero-functional (such as those described in the catalog of the Pierce Chemical Co., Rockford, Ill.), may be employed as the linker group. Coupling may be effected, for example, through amino groups, carboxyl groups, sulfhydryl groups or oxidized carbohydrate residues. There are numerous references describing such methodology, e.g., U.S. Pat. No. 4,671,958, to Rodwell et al.

[0832] Where a therapeutic agent is more potent when free from the antibody portion of the immunoconjugates of the present invention, it may be desirable to use a linker group which is cleavable during or upon internalization into a cell. A number of different cleavable linker groups have been described. The mechanisms for the intracellular release of an agent from these linker groups include cleavage by reduction of a disulfide bond (e.g., U.S. Pat. No. 4,489,710, to Spitler), by irradiation of a photolabile bond (e.g., U.S. Pat. No. 4,625,014, to Senter et al.), by hydrolysis of derivatized amino acid side chains (e.g., U.S. Pat. No. 4,638,045, to Kohn et al.), by serum complement-mediated hydrolysis (e.g., U.S. Pat. No. 4,671,958, to Rodwell et al.), and acid-catalyzed hydrolysis (e.g., U.S. Pat. No. 4,569,789, to Blaftler et al.).

[0833] It may be desirable to couple more than one agent to an antibody. In one embodiment, multiple molecules of an agent are coupled to one antibody molecule. In another embodiment, more than one type of agent may be coupled to one antibody. Regardless of the particular embodiment, immunoconjugates with more than one agent may be prepared in a variety of ways. For example, more than one agent may be coupled directly to an antibody molecule, or linkers that provide multiple sites for attachment can be used. Alternatively, a carrier can be used.

[0834] A carrier may bear the agents in a variety of ways, including covalent bonding either directly or via a linker group. Suitable carriers include proteins such as albumins (e.g., U.S. Pat. No. 4,507,234, to Kato et al.), peptides and polysaccharides such as aminodextran (e.g., U.S. Pat. No. 4,699,784, to Shih et al.). A carrier may also bear an agent by noncovalent bonding or by encapsulation, such as within a liposome vesicle (e.g., U.S. Pat. Nos. 4,429,008 and 4,873,088). Carriers specific for radionuclide agents include radiohalogenated small molecules and chelating compounds. For example, U.S. Pat. No. 4,735,792 discloses representative radiohalogenated small molecules and their synthesis. A radionuclide chelate may be formed from chelating compounds that include those containing nitrogen and sulfur atoms as the donor atoms for binding the metal, or metal oxide, radionuclide. For example, U.S. Pat. No. 4,673,562, to Davison et al. discloses representative chelating compounds and their synthesis.

[0835] T Cell Compositions

[0836] The present invention, in another aspect, provides T cells specific for a tumor polypeptide disclosed herein, or for a variant or derivative thereof. Such cells may generally be prepared in vitro or ex vivo, using standard procedures. For example, T cells may be isolated from bone marrow, peripheral blood, or a fraction of bone marrow or peripheral blood of a patient, using a commercially available cell separation system, such as the IsoleX™ System, available from Nexell Therapeutics, Inc. (Irvine, Calif.; see also U.S. Pat. Nos. 5,240,856; 5,215,926; WO 89/06280; WO 91/16116 and WO 92/07243). Alternatively, T cells may be derived from related or unrelated humans, non-human mammals, cell lines or cultures.

[0837] T cells may be stimulated with a polypeptide, polynucleotide encoding a polypeptide and/or an antigen presenting cell (APC) that expresses such a polypeptide. Such stimulation is performed under conditions and for a time sufficient to permit the generation of T cells that are specific for the polypeptide of interest. Preferably, a tumor polypeptide or polynucleotide of the invention is present within a delivery vehicle, such as a microsphere, to facilitate the generation of specific T cells.

[0838] T cells are considered to be specific for a polypeptide of the present invention if the T cells specifically proliferate, secrete cytokines or kill target cells coated with the polypeptide or expressing a gene encoding the polypeptide. T cell specificity may be evaluated using any of a variety of standard techniques. For example, within a chromium release assay or proliferation assay, a stimulation index of more than two fold increase in lysis and/or proliferation, compared to negative controls, indicates T cell specificity. Such assays may be performed, for example, as described in Chen et al., Cancer Res. 54:1065-1070, 1994. Alternatively, detection of the proliferation of T cells may be accomplished by a variety of known techniques. For example, T cell proliferation can be detected by measuring an increased rate of DNA synthesis (e.g., by pulse-labeling cultures of T cells with tritiated thymidine and measuring the amount of tritiated thymidine incorporated into DNA). Contact with a tumor polypeptide (100 ng/ml-100 μg/ml, preferably 200 ng/ml-25 μg/ml) for 3-7 days will typically result in at least a two fold increase in proliferation of the T cells. Contact as described above for 2-3 hours should result in activation of the T cells, as measured using standard cytokine assays in which a two fold increase in the level of cytokine release (e.g., TNF or IFN-γ) is indicative of T cell activation (see Coligan et al., Current Protocols in Immunology, vol. 1, Wiley Interscience (Greene 1998)). T cells that have been activated in response to a tumor polypeptide, polynucleotide or polypeptide-expressing APC may be CD4⁺ and/or CD8⁺. Tumor polypeptide-specific T cells may be expanded using standard techniques. Within preferred embodiments, the T cells are derived from a patient, a related donor or an unrelated donor, and are administered to the patient following stimulation and expansion.

[0839] For therapeutic purposes, CD4⁺ or CD8⁺ T cells that proliferate in response to a tumor polypeptide, polynucleotide or APC can be expanded in number either in vitro or in vivo. Proliferation of such T cells in vitro may be accomplished in a variety of ways. For example, the T cells can be re-exposed to a tumor polypeptide, or a short peptide corresponding to an immunogenic portion of such a polypeptide, with or without the addition of T cell growth factors, such as interleukin-2, and/or stimulator cells that synthesize a tumor polypeptide. Alternatively, one or more T cells that proliferate in the presence of the tumor polypeptide can be expanded in number by cloning. Methods for cloning cells are well known in the art, and include limiting dilution.

[0840] Pharmaceutical Compositions

[0841] In additional embodiments, the present invention concerns formulation of one or more of the polynucleotide, polypeptide, T-cell and/or antibody compositions disclosed herein in pharmaceutically-acceptable carriers for administration to a cell or an animal, either alone, or in combination with one or more other modalities of therapy.

[0842] It will be understood that, if desired, a composition as disclosed herein may be administered in combination with other agents as well, such as, e.g., other proteins or polypeptides or various pharmaceutically-active agents. In fact, there is virtually no limit to other components that may also be included, given that the additional agents do not cause a significant adverse effect upon contact with the target cells or host tissues. The compositions may thus be delivered along with various other agents as required in the particular instance. Such compositions may be purified from host cells or other biological sources, or alternatively may be chemically synthesized as described herein. Likewise, such compositions may further comprise substituted or derivatized RNA or DNA compositions.

[0843] Therefore, in another aspect of the present invention, pharmaceutical compositions are provided comprising one or more of the polynucleotide, polypeptide, antibody, and/or T-cell compositions described herein in combination with a physiologically acceptable carrier. In certain preferred embodiments, the pharmaceutical compositions of the invention comprise immunogenic polynucleotide and/or polypeptide compositions of the invention for use in prophylactic and theraputic vaccine applications. Vaccine preparation is generally described in, for example, M. F. Powell and M. J. Newman, eds., “Vaccine Design (the subunit and adjuvant approach),” Plenum Press (NY, 1995). Generally, such compositions will comprise one or more polynucleotide and/or polypeptide compositions of the present invention in combination with one or more immunostimulants.

[0844] It will be apparent that any of the pharmaceutical compositions described herein can contain pharmaceutically acceptable salts of the polynucleotides and polypeptides of the invention. Such salts can be prepared, for example, from pharmaceutically acceptable non-toxic bases, including organic bases (e.g., salts of primary, secondary and tertiary amines and basic amino acids) and inorganic bases (e.g., sodium, potassium, lithium, ammonium, calcium and magnesium salts).

[0845] In another embodiment, illustrative immunogenic compositions, e.g., vaccine compositions, of the present invention comprise DNA encoding one or more of the polypeptides as described above, such that the polypeptide is generated in situ. As noted above, the polynucleotide may be administered within any of a variety of delivery systems known to those of ordinary skill in the art. Indeed, numerous gene delivery techniques are well known in the art, such as those described by Rolland, Crit. Rev. Therap. Drug Carrier Systems 15:143-198, 1998, and references cited therein. Appropriate polynucleotide expression systems will, of course, contain the necessary regulatory DNA regulatory sequences for expression in a patient (such as a suitable promoter and terminating signal). Alternatively, bacterial delivery systems may involve the administration of a bacterium (such as Bacillus-Calmette-Guerrin) that expresses an immunogenic portion of the polypeptide on its cell surface or secretes such an epitope.

[0846] Therefore, in certain embodiments, polynucleotides encoding immunogenic polypeptides described herein are introduced into suitable mammalian host cells for expression using any of a number of known viral-based systems. In one illustrative embodiment, retroviruses provide a convenient and effective platform for gene delivery systems. A selected nucleotide sequence encoding a polypeptide of the present invention can be inserted into a vector and packaged in retroviral particles using techniques known in the art. The recombinant virus can then be isolated and delivered to a subject. A number of illustrative retroviral systems have been described (e.g., U.S. Pat. No. 5,219,740; Miller and Rosman (1989) BioTechniques 7:980-990; Miller, A. D. (1990) Human Gene Therapy 1:5-14; Scarpa et al. (1991) Virology 180:849-852; Burns et al. (1993) Proc. Natl. Acad. Sci. USA 90:8033-8037; and Boris-Lawrie and Temin (1993) Cur. Opin. Genet. Develop. 3:102-109.

[0847] In addition, a number of illustrative adenovirus-based systems have also been described. Unlike retroviruses which integrate into the host genome, adenoviruses persist extrachromosomally thus minimizing the risks associated with insertional mutagenesis (Haj-Ahmad and Graham (1986) J. Virol. 57:267-274; Bett et al. (1993) J. Virol. 67:5911-5921; Mittereder et al. (1994) Human Gene Therapy 5:717-729; Seth et al. (1994) J. Virol. 68:933-940; Barr et al. (1994) Gene Therapy 1:51-58; Berkner, K. L. (1988) BioTechniques 6:616-629; and Rich et al. (1993) Human Gene Therapy 4:461-476).

[0848] Various adeno-associated virus (AAV) vector systems have also been developed for polynucleotide delivery. AAV vectors can be readily constructed using techniques well known in the art. See, e.g., U.S. Pat. Nos. 5,173,414 and 5,139,941; International Publication Nos. WO 92/01070 and WO 93/03769; Lebkowski et al. (1988) Molec. Cell. Biol. 8:3988-3996; Vincent et al. (1990) Vaccines 90 (Cold Spring Harbor Laboratory Press); Carter, B. J. (1992) Current Opinion in Biotechnology 3:533-539; Muzyczka, N. (1992) Current Topics in Microbiol. and Immunol. 158:97-129; Kotin, R. M. (1994) Human Gene Therapy 5:793-801; Shelling and Smith (1994) Gene Therapy 1:165-169; and Zhou et al. (1994) J. Exp. Med. 179:1867-1875.

[0849] Additional viral vectors useful for delivering the polynucleotides encoding polypeptides of the present invention by gene transfer include those derived from the pox family of viruses, such as vaccinia virus and avian poxvirus. By way of example, vaccinia virus recombinants expressing the novel molecules can be constructed as follows. The DNA encoding a polypeptide is first inserted into an appropriate vector so that it is adjacent to a vaccinia promoter and flanking vaccinia DNA sequences, such as the sequence encoding thymidine kinase (TK). This vector is then used to transfect cells which are simultaneously infected with vaccinia. Homologous recombination serves to insert the vaccinia promoter plus the gene encoding the polypeptide of interest into the viral genome. The resulting TK.sup.(−) recombinant can be selected by culturing the cells in the presence of 5-bromodeoxyuridine and picking viral plaques resistant thereto.

[0850] A vaccinia-based infection/transfection. system can be conveniently used to provide for inducible, transient expression or coexpression of one or more polypeptides described herein in host cells of an organism. In this particular system, cells are first infected in vitro with a vaccinia virus recombinant that encodes the bacteriophage T7 RNA polymerase. This polymerase displays exquisite specificity in that it only transcribes templates bearing T7 promoters. Following infection, cells are transfected with the polynucleotide or polynucleotides of interest, driven by a T7 promoter. The polymerase expressed in the cytoplasm from the vaccinia virus recombinant transcribes the transfected DNA into RNA which is then translated into polypeptide by the host translational machinery. The method provides for high level, transient, cytoplasmic production of large quantities of RNA and its translation products. See, e.g., Elroy-Stein and Moss, Proc. Natl. Acad. Sci. USA (1990) 87:6743-6747; Fuerst et al. Proc. Natl. Acad. Sci. USA (1986) 83:8122-8126.

[0851] Alternatively, avipoxviruses, such as the fowlpox and canarypox viruses, can also be used to deliver the coding sequences of interest. Recombinant avipox viruses, expressing immunogens from mammalian pathogens, are known to confer protective immunity when administered to non-avian species. The use of an Avipox vector is particularly desirable in human and other mammalian species since members of the Avipox genus can only productively replicate in susceptible avian species and therefore are not infective in mammalian cells. Methods for producing recombinant Avipoxviruses are known in the art and employ genetic recombination, as described above with respect to the production of vaccinia viruses. See, e.g., WO 91/12882; WO 89/03429; and WO 92/03545.

[0852] Any of a number of alphavirus vectors can also be used for delivery of polynucleotide compositions of the present invention, such as those vectors described in U.S. Pat. Nos. 5,843,723; 6,015,686; 6,008,035 and 6,015,694. Certain vectors based on Venezuelan Equine Encephalitis (VEE) can also be used, illustrative examples of which can be found in U.S. Pat. Nos. 5,505,947 and 5,643,576.

[0853] Moreover, molecular conjugate vectors, such as the adenovirus chimeric vectors described in Michael et al. J. Biol. Chem. (1993) 268:6866-6869 and Wagner et al. Proc. Natl. Acad. Sci. USA (1992) 89:6099-6103, can also be used for gene delivery under the invention.

[0854] Additional illustrative information on these and other known viral-based delivery systems can be found, for example, in Fisher-Hoch et al., Proc. Natl. Acad. Sci. USA 86:317-321, 1989; Flexner et al., Ann. N.Y Acad Sci. 569:86-103, 1989; Flexner et al., Vaccine 8:17-21, 1990; U.S. Pat. Nos. 4,603,112, 4,769,330, and 5,017,487; WO 89/01973; U.S. Pat. No. 4,777,127; GB 2,200,651; EP 0,345,242; WO 91/02805; Berkner, Biotechniques 6:616-627, 1988; Rosenfeld et al., Science 252:431-434, 1991; Kolls et al., Proc. Natl. Acad Sci. USA 91:215-219, 1994; Kass-Eisler et al., Proc. Natl. Acad Sci. USA 90:11498-11502, 1993; Guzman et al., Circulation 88:2838-2848, 1993; and Guzman et al., Cir. Res. 73:1202-1207, 1993.

[0855] In certain embodiments, a polynucleotide may be integrated into the genome of a target cell. This integration may be in a specific location and orientation via homologous recombination (gene replacement) or it may be integrated in a random, non-specific location (gene augmentation). In yet further embodiments, the polynucleotide may be stably maintained in the cell as a separate, episomal segment of DNA. Such polynucleotide segments or “episomes” encode sequences sufficient to permit maintenance and replication independent of or in synchronization with the host cell cycle. The manner in which the expression construct is delivered to a cell and where in the cell the polynucleotide remains is dependent on the type of expression construct employed.

[0856] In another embodiment of the invention, a polynucleotide is administered/delivered as “naked” DNA, for example as described in Ulmer et al., Science 259:1745-1749, 1993 and reviewed by Cohen, Science 259:1691-1692, 1993. The uptake of naked DNA may be increased by coating the DNA onto biodegradable beads, which are efficiently transported into the cells.

[0857] In still another embodiment, a composition of the present invention can be delivered via a particle bombardment approach, many of which have been described. In one illustrative example, gas-driven particle acceleration can be achieved with devices such as those manufactured by Powderject Pharmaceuticals PLC (Oxford, UK) and Powderject Vaccines Inc. (Madison, Wis.), some examples of which are described in U.S. Pat. Nos. 5,846,796; 6,010,478; 5,865,796; 5,584,807; and EP Patent No. 0500 799. This approach offers a needle-free delivery approach wherein a dry powder formulation of microscopic particles, such as polynucleotide or polypeptide particles, are accelerated to high speed within a helium gas jet generated by a hand held device, propelling the particles into a target tissue of interest.

[0858] In a related embodiment, other devices and methods that may be useful for gas-driven needle-less injection of compositions of the present invention include those provided by Bioject, Inc. (Portland, Oreg.), some examples of which are described in U.S. Pat. Nos. 4,790,824; 5,064,413; 5,312,335; 5,383,851; 5,399,163; 5,520,639 and 5,993,412.

[0859] According to another embodiment, the pharmaceutical compositions described herein will comprise one or more immunostimulants in addition to the immunogenic polynucleotide, polypeptide, antibody, T-cell and/or APC compositions of this invention. An immunostimulant refers to essentially any substance that enhances or potentiates an immune response (antibody and/or cell-mediated) to an exogenous antigen. One preferred type of immunostimulant comprises an adjuvant. Many adjuvants contain a substance designed to protect the antigen from rapid catabolism, such as aluminum hydroxide or mineral oil, and a stimulator of immune responses, such as lipid A, Bortadella pertussis or Mycobacterium tuberculosis derived proteins. Certain adjuvants are commercially available as, for example, Freund's Incomplete Adjuvant and Complete Adjuvant (Difco Laboratories, Detroit, Mich.); Merck Adjuvant 65 (Merck and Company, Inc., Rahway, N.J.); AS-2 (SmithKline Beecham, Philadelphia, Pa.); aluminum salts such as aluminum hydroxide gel (alum) or aluminum phosphate; salts of calcium, iron or zinc; an insoluble suspension of acylated tyrosine; acylated sugars; cationically or anionically derivatized polysaccharides; polyphosphazenes; biodegradable microspheres; monophosphoryl lipid A and quil A. Cytokines, such as GM-CSF, interleukin-2, -7, -12, and other like growth factors, may also be used as adjuvants.

[0860] Within certain embodiments of the invention, the adjuvant composition is preferably one that induces an immune response predominantly of the Thl type. High levels of Th1-type cytokines (e.g., IFN-γ, TNFα, IL-2 and IL-12) tend to favor the induction of cell mediated immune responses to an administered antigen. In contrast, high levels of Th2-type cytokines (e.g., IL-4, IL-5, IL-6 and IL-10) tend to favor the induction of humoral immune responses. Following application of a vaccine as provided herein, a patient will support an immune response that includes Th1- and Th2-type responses. Within a preferred embodiment, in which a response is predominantly Th1-type, the level of Th1-type cytokines will increase to a greater extent than the level of Th2-type cytokines. The levels of these cytokines may be readily assessed using standard assays. For a review `of the families of cytokines, see Mosmann and Coffman, Ann. Rev. Immunol. 7:145-173, 1989.

[0861] Certain preferred adjuvants for eliciting a predominantly Th1-type response include, for example, a combination of monophosphoryl lipid A, preferably 3-de-O-acylated monophosphoryl lipid A, together with an aluminum salt. MPL® adjuvants are available from Corixa Corporation (Seattle, Wash.; see, for example, U.S. Pat. Nos. 4,436,727; 4,877,611; 4,866,034 and 4,912,094). CpG-containing oligonucleotides (in which the CpG dinucleotide is unmethylated) also induce a predominantly Th1 response. Such oligonucleotides are well known and are described, for example, in WO 96/02555, WO 99/33488 and U.S. Pat. Nos. 6,008,200 and 5,856,462. Immunostimulatory DNA sequences are also described, for example, by Sato et al., Science 273:352, 1996. Another preferred adjuvant comprises a saponin, such as Quil A, or derivatives thereof, including QS21 and QS7 (Aquila Biopharmaceuticals Inc., Framingham, Mass.); Escin; Digitonin; or Gypsophila or Chenopodium quinoa saponins. Other preferred formulations include more than one saponin in the adjuvant combinations of the present invention, for example combinations of at least two of the following group comprising QS21, QS7, Quil A, β-escin, or digitonin.

[0862] Alternatively the saponin formulations may be combined with vaccine vehicles composed of chitosan or other polycationic polymers, polylactide and polylactide-co-glycolide particles, poly-N-acetyl glucosamine-based polymer matrix, particles composed of polysaccharides or chemically modified polysaccharides, liposomes and lipid-based particles, particles composed of glycerol monoesters, etc. The saponins may also be formulated in the presence of cholesterol to form particulate structures such as liposomes or ISCOMs. Furthermore, the saponins may be formulated together with a polyoxyethylene ether or ester, in either a non-particulate solution or suspension, or in a particulate structure such as a paucilamelar liposome or ISCOM. The saponins may also be formulated with excipients such as Carbopol^{R} to increase viscosity, or may be formulated in a dry powder form with a powder excipient such as lactose.

[0863] In one preferred embodiment, the adjuvant system includes the combination of a monophosphoryl lipid A and a saponin derivative, such as the combination of QS21 and 3D-MPL® adjuvant, as described in WO 94/00153, or a less reactogenic composition where the QS21 is quenched with cholesterol, as described in WO 96/33739. Other preferred formulations comprise an oil-in-water emulsion and tocopherol. Another particularly preferred adjuvant formulation employing QS21, 3D-MPL® adjuvant and tocopherol in an oil-in-water emulsion is described in WO 95/17210.

[0864] Another enhanced adjuvant system involves the combination of a CpG-containing oligonucleotide and a saponin derivative particularly the combination of CpG and QS21 is disclosed in WO 00/09159. Preferably the formulation additionally comprises an oil in water emulsion and tocopherol.

[0865] Additional illustrative adjuvants for use in the pharmaceutical compositions of the invention include Montanide ISA 720 (Seppic, France), SAF (Chiron, Calif., United States), ISCOMS (CSL), MF-59 (Chiron), the SBAS series of adjuvants (e.g., SBAS-2 or SBAS-4, available from SmithKline Beecham, Rixensart, Belgium), Detox (Enhanzyn®; Corixa, Hamilton, Mont.), RC-529 (Corixa, Hamilton, Mont.) and other aminoalkyl glucosaminide 4-phosphates (AGPs), such as those described in pending U.S. patent application Ser. Nos. 08/853,826 and 09/074,720, the disclosures of which are incorporated herein by reference in their entireties, and polyoxyethylene ether adjuvants such as those described in WO 99/52549A1.

[0866] Other preferred adjuvants include adjuvant molecules of the general formula (I): HO(CH₂CH₂O)ₙ-A-R,

[0867] wherein, n is 1-50, A is a bond or —C(O)—, R is C₁₋₅₀ alkyl or Phenyl Cls50 alkyl.

[0868] One embodiment of the present invention consists of a vaccine formulation comprising a polyoxyethylene ether of general formula (I), wherein n is between 1 and 50, preferably 4-24, most preferably 9; the R component is C₁₋₅₀, preferably C₄-C₂₀ alkyl and most preferably C₁₂ alkyl, and A is a bond. The concentration of the polyoxyethylene ethers should be in the range 0.1-20%, preferably from 0.1-10%, and most preferably in the range 0.1-1%. Preferred polyoxyethylene ethers are selected from the following group: polyoxyethylene-9-lauryl ether, polyoxyethylene-9-steoryl ether, polyoxyethylene-8-steoryl ether, polyoxyethylene-4-lauryl ether, polyoxyethylene-35-lauryl ether, and polyoxyethylene-23-lauryl ether. Polyoxyethylene ethers such as polyoxyethylene lauryl ether are described in the Merck index (12^{th} edition: entry 7717). These adjuvant molecules are described in WO 99/52549. The polyoxyethylene ether according to the general formula (I) above may, if desired, be combined with another adjuvant. For example, a preferred adjuvant combination is preferably with CpG as described in the pending UK patent application GB 9820956.2.

[0869] According to another embodiment of this invention, an immunogenic composition described herein is delivered to a host via antigen presenting cells (APCs), such as dendritic cells, macrophages, B cells, monocytes and other cells that may be engineered to be efficient APCs. Such cells may, but need not, be genetically modified to increase the capacity for presenting the antigen, to improve activation and/or maintenance of the T cell response, to have anti-tumor effects per se and/or to be immunologically compatible with the receiver (i.e., matched HLA haplotype). APCs may generally be isolated from any of a variety of biological fluids and organs, including tumor and peritumoral tissues, and may be autologous, allogeneic, syngeneic or xenogeneic cells.

[0870] Certain preferred embodiments of the present invention use dendritic cells or progenitors thereof as antigen-presenting cells. Dendritic cells are highly potent APCs (Banchereau and Steinman, Nature 392:245-251, 1998) and have been shown to be effective as a physiological adjuvant for eliciting prophylactic or therapeutic antitumor immunity (see Timmerrman and Levy, Ann. Rev. Med. 50:507-529, 1999). In general, dendritic cells may be identified based on their typical shape (stellate in situ, with marked cytoplasmic processes (dendrites) visible in vitro), their ability to take up, process and present antigens with high efficiency and their ability to activate naive T cell responses. Dendritic cells may, of course, be engineered to express specific cell-surface receptors or ligands that are not commonly found on dendritic cells in vivo or ex vivo, and such modified dendritic cells are contemplated by the present invention. As an alternative to dendritic cells, secreted vesicles antigen-loaded dendritic cells (called exosomes) may be used within a vaccine (see Zitvogel et al., Nature Med. 4:594-600, 1998).

[0871] Dendritic cells and progenitors may be obtained from peripheral blood, bone marrow, tumor-infiltrating cells, peritumoral tissues-infiltrating cells, lymph nodes, spleen, skin, umbilical cord blood or any other suitable tissue or fluid. For example, dendritic cells may be differentiated ex vivo by adding a combination of cytokines such as GM-CSF, IL-4, IL-13 and/or TNFα to cultures of monocytes harvested from peripheral blood. Alternatively, CD34 positive cells harvested from peripheral blood, umbilical cord blood or bone marrow may be differentiated into dendritic cells by adding to the culture medium combinations of GM-CSF, IL-3, TNFα, CD40 ligand, LPS, flt3 ligand and/or other compound(s) that induce differentiation, maturation and proliferation of dendritic cells.

[0872] Dendritic cells are conveniently categorized as “immature” and “mature” cells, which allows a simple way to discriminate between two well characterized phenotypes. However, this nomenclature should not be construed to exclude all possible intermediate stages of differentiation. Immature dendritic cells are characterized as APC with a high capacity for antigen uptake and processing, which correlates with the high expression of Fcγ receptor and mannose receptor. The mature phenotype is typically characterized by a lower expression of these markers, but a high expression of cell surface molecules responsible for T cell activation such as class I and class II MHC, adhesion molecules (e.g., CD54 and CD1 1) and costimulatory molecules (e.g., CD40, CD80, CD86 and 4-1BB).

[0873] APCs may generally be transfected with a polynucleotide of the invention (or portion or other variant thereof) such that the encoded polypeptide, or an immunogenic portion thereof, is expressed on the cell surface. Such transfection may take place ex vivo, and a pharmaceutical composition comprising such transfected cells may then be used for therapeutic purposes, as described herein. Alternatively, a gene delivery vehicle that targets a dendritic or other antigen presenting cell may be administered to a patient, resulting in transfection that occurs in vivo. In vivo and ex vivo transfection of dendritic cells, for example, may generally be performed using any methods known in the art, such as those described in WO 97/24447, or the gene gun approach described by Mahvi et al., Immunology and cell Biology 75:456-460, 1997. Antigen loading of dendritic cells may be achieved by incubating dendritic cells or progenitor cells with the tumor polypeptide, DNA (naked or within a plasmid vector) or RNA; or with antigen-expressing recombinant bacterium or viruses (e.g., vaccinia, fowlpox, adenovirus or lentivirus vectors). Prior to loading, the polypeptide may be covalently conjugated to an immunological partner that provides T cell help (e.g., a carrier molecule). Alternatively, a dendritic cell may be pulsed with a non-conjugated immunological partner, separately or in the presence of the polypeptide.

[0874] While any suitable carrier known to those of ordinary skill in the art may be employed in the pharmaceutical compositions of this invention, the type of carrier will typically vary depending on the mode of administration. Compositions of the present invention may be formulated for any appropriate manner of administration, including for example, topical, oral, nasal, mucosal, intravenous, intracranial, intraperitoneal, subcutaneous and intramuscular administration.

[0875] Carriers for use within such pharmaceutical compositions are biocompatible, and may also be biodegradable. In certain embodiments, the formulation preferably provides a relatively constant level of active component release. In other embodiments, however, a more rapid rate of release immediately upon administration may be desired. The formulation of such compositions is well within the level of ordinary skill in the art using known techniques. Illustrative carriers useful in this regard include microparticles of poly(lactide-co-glycolide), polyacrylate, latex, starch, cellulose, dextran and the like. Other illustrative delayed-release carriers include supramolecular biovectors, which comprise a non-liquid hydrophilic core (e.g., a cross-linked polysaccharide or oligosaccharide) and, optionally, an external layer comprising an amphiphilic compound, such as a phospholipid (see e.g., U.S. Pat. No. 5,151,254 and PCT applications WO 94/20078, WO/94/23701 and WO 96/06638). The amount of active compound contained within a sustained release formulation depends upon the site of implantation, the rate and expected duration of release and the nature of the condition to be treated or prevented.

[0876] In another illustrative embodiment, biodegradable microspheres (e.g., polylactate polyglycolate) are employed as carriers for the compositions of this invention. Suitable biodegradable microspheres are disclosed, for example, in U.S. Pat. Nos. 4,897,268; 5,075,109; 5,928,647; 5,811,128; 5,820,883; 5,853,763; 5,814,344, 5,407,609 and 5,942,252. Modified hepatitis B core protein carrier systems. such as described in WO/99 40934, and references cited therein, will also be useful for many applications. Another illustrative carrier/delivery system employs a carrier comprising particulate-protein complexes, such as those described in U.S. Pat. No. 5,928,647, which are capable of inducing a class I-restricted cytotoxic T lymphocyte responses in a host.

[0877] The pharmaceutical compositions of the invention will often further comprise one or more buffers (e.g., neutral buffered saline or phosphate buffered saline), carbohydrates (e.g., glucose, mannose, sucrose or dextrans), mannitol, proteins, polypeptides or amino acids such as glycine, antioxidants, bacteriostats, chelating agents such as EDTA or glutathione, adjuvants (e.g., aluminum hydroxide), solutes that render the formulation isotonic, hypotonic or weakly hypertonic with the blood of a recipient, suspending agents, thickening agents and/or preservatives. Alternatively, compositions of the present invention may be formulated as a lyophilizate.

[0878] The pharmaceutical compositions described herein may be presented in unit-dose or multi-dose containers, such as sealed ampoules or vials. Such containers are typically sealed in such a way to preserve the sterility and stability of the formulation until use. In general, formulations may be stored as suspensions, solutions or emulsions in oily or aqueous vehicles. Alternatively, a pharmaceutical composition may be stored in a freeze-dried condition requiring only the addition of a sterile liquid carrier immediately prior to use.

[0879] The development of suitable dosing and treatment regimens for using the particular compositions described herein in a variety of treatment regimens, including e.g., oral, parenteral, intravenous, intranasal, and intramuscular administration and formulation, is well known in the art, some of which are briefly discussed below for general purposes of illustration.

[0880] In certain applications, the pharmaceutical compositions disclosed herein may be delivered via oral administration to an animal. As such, these compositions may be formulated with an inert diluent or with an assimilable edible carrier, or they may be enclosed in hard- or soft-shell gelatin capsule, or they may be compressed into tablets, or they may be incorporated directly with the food of the diet.

[0881] The active compounds may even be incorporated with excipients and used in the form of ingestible tablets, buccal tables, troches, capsules, elixirs, suspensions, syrups, wafers, and the like (see, for example, Mathiowitz et al., Nature Mar. 27, 1997;386(6623):410-4; Hwang et al., Crit Rev Ther Drug Carrier Syst 1998;15(3):243-84; U.S. Pat. No. 5,641,515; U.S. Pat. No. 5,580,579 and U.S. Pat. No. 5,792,451). Tablets, troches, pills, capsules and the like may also contain any of a variety of additional components, for example, a binder, such as gum tragacanth, acacia, cornstarch, or gelatin; excipients, such as dicalcium phosphate; a disintegrating agent, such as corn starch, potato starch, alginic acid and the like; a lubricant, such as magnesium stearate; and a sweetening agent, such as sucrose, lactose or saccharin may be added or a flavoring agent, such as peppermint, oil of wintergreen, or cherry flavoring. When the dosage unit form is a capsule, it may contain, in addition to materials of the above type, a liquid carrier. Various other materials may be present as coatings or to otherwise modify the physical form of the dosage unit. For instance, tablets, pills, or capsules may be coated with shellac, sugar, or both. Of course, any material used in preparing any dosage unit form should be pharmaceutically pure and substantially non-toxic in the amounts employed. In addition, the active compounds may be incorporated into sustained-release preparation and formulations.

[0882] Typically, these formulations will contain at least about 0.1% of the active compound or more, although the percentage of the active ingredient(s) may, of course, be varied and may conveniently be between about 1 or 2% and about 60% or 70% or more of the weight or volume of the total formulation. Naturally, the amount of active compound(s) in each therapeutically useful composition may be prepared is such a way that a suitable dosage will be obtained in any given unit dose of the compound. Factors such as solubility, bioavailability, biological half-life, route of administration, product shelf life, as well as other pharmacological considerations will be contemplated by one skilled in the art of preparing such pharmaceutical formulations, and as such, a variety of dosages and treatment regimens may be desirable.

[0883] For oral administration, the compositions of the present invention may alternatively be incorporated with one or more excipients in the form of a mouthwash, dentifrice, buccal tablet, oral spray, or sublingual orally-administered formulation. Alternatively, the active ingredient may be incorporated into an oral solution such as one containing sodium borate, glycerin and potassium bicarbonate, or dispersed in a dentifrice, or added in a therapeutically-effective amount to a composition that may include water, binders, abrasives, flavoring agents, foaming agents, and humectants. Alternatively the compositions may be fashioned into a tablet or solution form that may be placed under the tongue or otherwise dissolved in the mouth.

[0884] In certain circumstances it will be desirable to deliver the pharmaceutical compositions disclosed herein parenterally, intravenously, intramuscularly, or even intraperitoneally. Such approaches are well known to the skilled artisan, some of which are further described, for example, in U.S. Pat. No. 5,543,158; U.S. Pat. No. 5,641,515 and U.S. Pat. No. 5,399,363. In certain embodiments, solutions of the active compounds as free base or pharmacologically acceptable salts may be prepared in water suitably mixed with a surfactant, such as hydroxypropylcellulose. Dispersions may also be prepared in glycerol, liquid polyethylene glycols, and mixtures thereof and in oils. Under ordinary conditions of storage and use, these preparations generally will contain a preservative to prevent the growth of microorganisms.

[0885] Illustrative pharmaceutical forms suitable for injectable use include sterile aqueous solutions or dispersions and sterile powders for the extemporaneous preparation of sterile injectable solutions or dispersions (for example, see U.S. Pat. No. 5,466,468). In all cases the form must be sterile and must be fluid to the extent that easy syringability exists. It must be stable under the conditions of manufacture and storage and must be preserved against the contaminating action of microorganisms, such as bacteria and fungi. The carrier can be a solvent or dispersion medium containing, for example, water, ethanol, polyol (e.g., glycerol, propylene glycol, and liquid polyethylene glycol, and the like), suitable mixtures thereof, and/or vegetable oils. Proper fluidity may be maintained, for example, by the use of a coating, such as lecithin, by the maintenance of the required particle size in the case of dispersion and/or by the use of surfactants. The prevention of the action of microorganisms can be facilitated by various antibacterial and antifungal agents, for example, parabens, chlorobutanol, phenol, sorbic acid, thimerosal, and the like. In many cases, it will be preferable to include isotonic agents, for example, sugars or sodium chloride. Prolonged absorption of the injectable compositions can be brought about by the use in the compositions of agents delaying absorption, for example, aluminum monostearate and gelatin.

[0886] In one embodiment, for parenteral administration in an aqueous solution, the solution should be suitably buffered if necessary and the liquid diluent first rendered isotonic with sufficient saline or glucose. These particular aqueous solutions are especially suitable for intravenous, intramuscular, subcutaneous and intraperitoneal administration. In this connection, a sterile aqueous medium that can be employed will be known to those of skill in the art in light of the present disclosure. For example, one dosage may be dissolved in 1 ml of isotonic NaCl solution and either added to 1000 ml of hypodermoclysis fluid or injected at the proposed site of infusion, (see for example, “Remington's Pharmaceutical Sciences” 15th Edition, pages 1035-1038 and 1570-1580). Some variation in dosage will necessarily occur depending on the condition of the subject being treated. Moreover, for human administration, preparations will of course preferably meet sterility, pyrogenicity, and the general safety and purity standards as required by FDA Office of Biologics standards.

[0887] In another embodiment of the invention, the compositions disclosed herein may be formulated in a neutral or salt form. Illustrative pharmaceutically-acceptable salts include the acid addition salts (formed with the free amino groups of the protein) and which are formed with inorganic acids such as, for example, hydrochloric or phosphoric acids, or such organic acids as acetic, oxalic, tartaric, mandelic, and the like. Salts formed with the free carboxyl groups can also be derived from inorganic bases such as, for example, sodium, potassium, ammonium, calcium, or ferric hydroxides, and such organic bases as isopropylamine, trimethylamine, histidine, procaine and the like. Upon formulation, solutions will be administered in a manner compatible with the dosage formulation and in such amount as is therapeutically effective.

[0888] The carriers can further comprise any and all solvents, dispersion media, vehicles, coatings, diluents, antibacterial and antifingal agents, isotonic and absorption delaying agents, buffers, carrier solutions, suspensions, colloids, and the like. The use of such media and agents for pharmaceutical active substances is well known in the art. Except insofar as any conventional media or agent is incompatible with the active ingredient, its use in the therapeutic compositions is contemplated. Supplementary active ingredients can also be incorporated into the compositions. The phrase “pharmaceutically-acceptable” refers to molecular entities and compositions that do not produce an allergic or similar untoward reaction when administered to a human.

[0889] In certain embodiments, the pharmaceutical compositions may be delivered by intranasal sprays, inhalation, and/or other aerosol delivery vehicles. Methods for delivering genes, nucleic acids, and peptide compositions directly to the lungs via nasal aerosol sprays has been described, e.g., in U.S. Pat. No. 5,756,353 and U.S. Pat. No. 5,804,212. Likewise, the delivery of drugs using intranasal microparticle resins (Takenaga et al., J Controlled Release Mar. 2, 1998;52(1-2):81-7) and lysophosphatidyl-glycerol compounds (U.S. Pat. No. 5,725,871) are also well-known in the pharmaceutical arts. Likewise, illustrative transmucosal drug delivery in the form of a polytetrafluoroetheylene support matrix is described in U.S. Pat. No. 5,780,045.

[0890] In certain embodiments, liposomes, nanocapsules, microparticles, lipid particles, vesicles, and the like, are used for the introduction of the compositions of the present invention into suitable host cells/organisms. In particular, the compositions of the present invention may be formulated for delivery either encapsulated in a lipid particle, a liposome, a vesicle, a nanosphere, or a nanoparticle or the like. Alternatively, compositions of the present invention can be bound, either covalently or non-covalently, to the surface of such carrier vehicles.

[0891] The formation and use of liposome and liposome-like preparations as potential drug carriers is generally known to those of skill in the art (see for example, Lasic, Trends Biotechnol 1998 July;16(7):307-21; Takakura, Nippon Rinsho 1998 March;56(3):691-5; Chandran et al., Indian J Exp Biol. 1997 August;35(8):801-9; Margalit, Crit Rev Ther Drug Carrier Syst. 1995;12(2-3):233-61; U.S. Pat. No. 5,567,434; U.S. Pat. No. 5,552,157; U.S. Pat. No. 5,565,213; U.S. Pat. No. 5,738,868 and U.S. Pat. No. 5,795,587, each specifically incorporated herein by reference in its entirety).

[0892] Liposomes have been used successfully with a number of cell types that are normally difficult to transfect by other procedures, including T cell suspensions, primary hepatocyte cultures and PC 12 cells (Renneisen et al., J Biol Chem. Sep. 25, 1990;265(27):16337-42; Muller et al., DNA Cell Biol. 1990 April;9(3):221-9). In addition, liposomes are free of the DNA length constraints that are typical of viral-based delivery systems. Liposomes have been used effectively to introduce genes, various drugs, radiotherapeutic agents, enzymes, viruses, transcription factors, allosteric effectors and the like, into a variety of cultured cell lines and animals. Furthermore, he use of liposomes does not appear to be associated with autoimmune responses or unacceptable toxicity after systemic delivery.

[0893] In certain embodiments, liposomes are formed from phospholipids that are dispersed in an aqueous medium and spontaneously form multilamellar concentric bilayer vesicles (also termed multilamellar vesicles (MLVs).

[0894] Alternatively, in other embodiments, the invention provides for pharmaceutically-acceptable nanocapsule formulations of the compositions of the present invention. Nanocapsules can generally entrap compounds in a stable and reproducible way (see, for example, Quintanar-Guerrero et al., Drug Dev Ind Pharm. 1998 December;24(12):1113-28). To avoid side effects due to intracellular polymeric overloading, such ultrafine particles (sized around 0.1 μm) may be designed using polymers able to be degraded in vivo. Such particles can be made as described, for example, by Couvreur et al., Crit Rev Ther Drug Carrier Syst. 1988;5(1):1-20; zur Muhlen et al., Eur J Pharm Biopharm. 1998 March;45(2):149-55; Zambaux et al. J Controlled Release. Jan. 2, 1998;50(1-3):31-40; and U.S. Pat. No. 5,145,684.

[0895] Cancer Therapeutic Methods

[0896] In further aspects of the present invention, the pharmaceutical compositions described herein may be used for the treatment of cancer, particularly for the immunotherapy of prostate cancer. Within such methods, the pharmaceutical compositions described herein are administered to a patient, typically a warm-blooded animal, preferably a human. A patient may or may not be afflicted with cancer. Accordingly, the above pharmaceutical compositions may be used to prevent the development of a cancer or to treat a patient afflicted with a cancer. Pharmaceutical compositions and vaccines may be administered either prior to or following surgical removal of primary tumors and/or treatment such as administration of radiotherapy or conventional chemotherapeutic drugs. As discussed above, administration of the pharmaceutical compositions may be by any suitable method, including administration by intravenous, intraperitoneal, intramuscular, subcutaneous, intranasal, intradermal, anal, vaginal, topical and oral routes.

[0897] Within certain embodiments, immunotherapy may be active immunotherapy, in which treatment relies on the in vivo stimulation of the endogenous host immune system to react against tumors with the administration of immune response-modifying agents (such as polypeptides and polynucleotides as provided herein).

[0898] Within other embodiments, immunotherapy may be passive immunotherapy, in which treatment involves the delivery of agents with established tumor-immune reactivity (such as effector cells or antibodies) that can directly or indirectly mediate antitumor effects and does not necessarily depend on an intact host immune system. Examples of effector cells include T cells as discussed above, T lymphocytes (such as CD8⁺cytotoxic T lymphocytes and CD4⁺T-helper tumor-infiltrating lymphocytes), killer cells (such as Natural Killer cells and lymphokine-activated killer cells), B cells and antigen-presenting cells (such as dendritic cells and macrophages) expressing a polypeptide provided herein. T cell receptors and antibody receptors specific for the polypeptides recited herein may be cloned, expressed and transferred into other vectors or effector cells for adoptive immunotherapy. The polypeptides provided herein may also be used to generate antibodies or anti-idiotypic antibodies (as described above and in U.S. Pat. No. 4,918,164) for passive immunotherapy.

[0899] Effector cells may generally be obtained in sufficient quantities for adoptive immunotherapy by growth in vitro, as described herein. Culture conditions for expanding single antigen-specific effector cells to several billion in number with retention of antigen recognition in vivo are well known in the art. Such in vitro culture conditions typically use intermittent stimulation with antigen, often in the presence of cytokines (such as IL-2) and non-dividing feeder cells. As noted above, immunoreactive polypeptides as provided herein may be used to rapidly expand antigen-specific T cell cultures in order to generate a sufficient number of cells for immunotherapy. In particular, antigen-presenting cells, such as dendritic, macrophage, monocyte, fibroblast and/or B cells, may be pulsed with immunoreactive polypeptides or transfected with one or more polynucleotides using standard techniques well known in the art. For example, antigen-presenting cells can be transfected with a polynucleotide having a promoter appropriate for increasing expression in a recombinant virus or other expression system. Cultured effector cells for use in therapy must be able to grow and distribute widely, and to survive long term in vivo. Studies have shown that cultured effector cells can be induced to grow in vivo and to survive long term in substantial numbers by repeated stimulation with antigen supplemented with IL-2 (see, for example, Cheever et al., Immunological Reviews 157:177, 1997).

[0900] Alternatively, a vector expressing a polypeptide recited herein may be introduced into antigen presenting cells taken from a patient and clonally propagated ex vivo for transplant back into the same patient. Transfected cells may be reintroduced into the patient using any means known in the art, preferably in sterile form by intravenous, intracavitary, intraperitoneal or intratumor administration.

[0901] Routes and frequency of administration of the therapeutic compositions described herein, as well as dosage, will vary from individual to individual, and may be readily established using standard techniques. In general, the pharmaceutical compositions and vaccines may be administered by injection (e.g., intracutaneous, intramuscular, intravenous or subcutaneous), intranasally (e.g., by aspiration) or orally. Preferably, between 1 and 10 doses may be administered over a 52 week period. Preferably, 6 doses are administered, at intervals of 1 month, and booster vaccinations may be given periodically thereafter. Alternate protocols may be appropriate for individual patients. A suitable dose is an amount of a compound that, when administered as described above, is capable of promoting an anti-tumor immune response, and is at least 10-50% above the basal (i.e., untreated) level. Such response can be monitored by measuring the anti-tumor antibodies in a patient or by vaccine-dependent generation of cytolytic effector cells capable of killing the patient's tumor cells in vitro. Such vaccines should also be capable of causing an immune response that leads to an improved clinical outcome (e.g. more frequent remissions, complete or partial or longer disease-free survival) in vaccinated patients as compared to non-vaccinated patients. In general, for pharmaceutical compositions and vaccines comprising one or more polypeptides, the amount of each polypeptide present in a dose ranges from about 25 μg to 5 mg per kg of host. Suitable dose sizes will vary with the size of the patient, but will typically range from about 0.1 mL to about 5 mL.

[0902] In general, an appropriate dosage and treatment regimen provides the active compound(s) in an amount sufficient to provide therapeutic and/or prophylactic benefit. Such a response can be monitored by establishing an improved clinical outcome (e.g., more frequent remissions, complete or partial, or longer disease-free survival) in treated patients as compared to non-treated patients. Increases in preexisting immune responses to a tumor protein generally correlate with an improved clinical outcome. Such immune responses may generally be evaluated using standard proliferation, cytotoxicity or cytokine assays, which may be performed using samples obtained from a patient before and after treatment.

[0903] Cancer Detection and Diagnostic Compositions Methods and Kits

[0904] In general, a cancer may be detected in a patient based on the presence of one or more prostate tumor proteins and/or polynucleotides encoding such proteins in a biological sample (for example, blood, sera, sputum urine and/or tumor biopsies) obtained from the patient. In other words, such proteins may be used as markers to indicate the presence or absence of a cancer such as prostate cancer. In addition, such proteins may be useful for the detection of other cancers. The binding agents provided herein generally permit detection of the level of antigen that binds to the agent in the biological sample. Polynucleotide primers and probes may be used to detect the level of mRNA encoding a tumor protein, which is also indicative of the presence or absence of a cancer. In general, a prostate tumor sequence should be present at a level that is at least three fold higher in tumor tissue than in normal tissue

[0905] There are a variety of assay formats known to those of ordinary skill in the art for using a binding agent to detect polypeptide markers in a sample. See, e.g., Harlow and Lane, Antibodies: A Laboratory Manual, Cold Spring Harbor Laboratory, 1988. In general, the presence or absence of a cancer in a patient may be determined by (a) contacting a biological sample obtained from a patient with a binding agent; (b) detecting in the sample a level of polypeptide that binds to the binding agent; and (c) comparing the level of polypeptide with a predetermined cut-off value.

[0906] In a preferred embodiment, the assay involves the use of binding agent immobilized on a solid support to bind to and remove the polypeptide from the remainder of the sample. The bound polypeptide may then be detected using a detection reagent that contains a reporter group and specifically binds to the binding agent/polypeptide complex. Such detection reagents may comprise, for example, a binding agent that specifically binds to the polypeptide or an antibody or other agent that specifically binds to the binding agent, such as an anti-immunoglobulin, protein G, protein A or a lectin. Alternatively, a competitive assay may be utilized, in which a polypeptide is labeled with a reporter group and allowed to bind to the immobilized binding agent after incubation of the binding agent with the sample. The extent to which components of the sample inhibit the binding of the labeled polypeptide to the binding agent is indicative of the reactivity of the sample with the immobilized binding agent. Suitable polypeptides for use within such assays include full length prostate tumor proteins and polypeptide portions thereof to which the binding agent binds, as described above.

[0907] The solid support may be any material known to those of ordinary skill in the art to which the tumor protein may be attached. For example, the solid support may be a test well in a microtiter plate or a nitrocellulose or other suitable membrane. Alternatively, the support may be a bead or disc, such as glass, fiberglass, latex or a plastic material such as polystyrene or polyvinylchloride. The support may also be a magnetic particle or a fiber optic sensor, such as those disclosed, for example, in U.S. Pat. No. 5,359,681. The binding agent may be immobilized on the solid support using a variety of techniques known to those of skill in the art, which are amply described in the patent and scientific literature. In the context of the present invention, the term “immobilization” refers to both noncovalent association, such as adsorption, and covalent attachment (which may be a direct linkage between the agent and functional groups on the support or may be a linkage by way of a cross-linking agent). Immobilization by adsorption to a well in a microtiter plate or to a membrane is preferred. In such cases, adsorption may be achieved by contacting the binding agent, in a suitable buffer, with the solid support for a suitable amount of time. The contact time varies with temperature, but is typically between about 1 hour and about 1 day. In general, contacting a well of a plastic microtiter plate (such as polystyrene or polyvinylchloride) with an amount of binding agent ranging from about 10 ng to about 10 μg, and preferably about 100 ng to about 1 μg, is sufficient to immobilize an adequate amount of binding agent.

[0908] Covalent attachment of binding agent to a solid support may generally be achieved by first reacting the support with a bifunctional reagent that will react with both the support and a functional group, such as a hydroxyl or amino group, on the binding agent. For example, the binding agent may be covalently attached to supports having an appropriate polymer coating using benzoquinone or by condensation of an aldehyde group on the support with an amine and an active hydrogen on the binding partner (see, e.g., Pierce Immunotechnology Catalog and Handbook, 1991, at A12-A13).

[0909] In certain embodiments, the assay is a two-antibody sandwich assay. This assay may be performed by first contacting an antibody that has been immobilized on a solid support, commonly the well of a microtiter plate, with the sample, such that polypeptides within the sample are allowed to bind to the immobilized antibody. Unbound sample is then removed from the immobilized polypeptide-antibody complexes and a detection reagent (preferably a second antibody capable of binding to a different site on the polypeptide) containing a reporter group is added. The amount of detection reagent that remains bound to the solid support is then determined using a method appropriate for the specific reporter group.

[0910] More specifically, once the antibody is immobilized on the support as described above, the remaining protein binding sites on the support are typically blocked. Any suitable blocking agent known to those of ordinary skill in the art, such as bovine serum albumin or Tween 20™ (Sigma Chemical Co., St. Louis, Mo.). The immobilized antibody is then incubated with the sample, and polypeptide is allowed to bind to the antibody. The sample may be diluted with a suitable diluent, such as phosphate-buffered saline (PBS) prior to incubation. In general, an appropriate contact time (i.e., incubation time) is a period of time that is sufficient to detect the presence of polypeptide within a sample obtained from an individual with prostate cancer, Preferably, the contact time is sufficient to achieve a level of binding that is at least about 95% of that achieved at equilibrium between bound and unbound polypeptide. Those of ordinary skill in the art will recognize that the time necessary to achieve equilibrium may be readily determined by assaying the level of binding that occurs over a period of time. At room temperature, an incubation time of about 30 minutes is generally sufficient.

[0911] Unbound sample may then be removed by washing the solid support with an appropriate buffer, such as PBS containing 0.1% Tween 20™. The second antibody, which contains a reporter group, may then be added to the solid support. Preferred reporter groups include those groups recited above.

[0912] The detection reagent is then incubated with the immobilized antibody-polypeptide complex for an amount of time sufficient to detect the bound polypeptide. An appropriate amount of time may generally be determined by assaying the level of binding that occurs over a period of time. Unbound detection reagent is then removed and bound detection reagent is detected using the reporter group. The method employed for detecting the reporter group depends upon the nature of the reporter group. For radioactive groups, scintillation counting or autoradiographic methods are generally appropriate. Spectroscopic methods may be used to detect dyes, luminescent groups and fluorescent groups. Biotin may be detected using avidin, coupled to a different reporter group (commonly a radioactive or fluorescent group or an enzyme). Enzyme reporter groups may generally be detected by the addition of substrate (generally for a specific period of time), followed by spectroscopic or other analysis of the reaction products.

[0913] To determine the presence or absence of a cancer, such as prostate cancer, the signal detected from the reporter group that remains bound to the solid support is generally compared to a signal that corresponds to a predetermined cut-off value. In one preferred embodiment, the cut-off value for the detection of a cancer is the average mean signal obtained when the immobilized antibody is incubated with samples from patients without the cancer. In general, a sample generating a signal that is three standard deviations above the predetermined cut-off value is considered positive for the cancer. In an alternate preferred embodiment, the cut-off value is determined using a Receiver Operator Curve, according to the method of Sackett et al., Clinical Epidemiology: A Basic Science for Clinical Medicine, Little Brown and Co., 1985, p. 106-7. Briefly, in this embodiment, the cut-off value may be determined from a plot of pairs of true positive rates (i.e., sensitivity) and false positive rates (1 00%-specificity) that correspond to each possible cut-off value for the diagnostic test result. The cut-off value on the plot that is the closest to the upper left-hand corner (i.e., the value that encloses the largest area) is the most accurate cut-off value, and a sample generating a signal that is higher than the cut-off value determined by this method may be considered positive. Alternatively, the cut-off value may be shifted to the left along the plot, to minimize the false positive rate, or to the right, to minimize the false negative rate. In general, a sample generating a signal that is higher than the cut-off value determined by this method is considered positive for a cancer.

[0914] In a related embodiment, the assay is performed in a flow-through or strip test format, wherein the binding agent is immobilized on a membrane, such as nitrocellulose. In the flow-through test, polypeptides within the sample bind to the immobilized binding agent as the sample passes through the membrane. A second, labeled binding agent then binds to the binding agent-polypeptide complex as a solution containing the second binding agent flows through the membrane. The detection of bound second binding agent may then be performed as described above. In the strip test format, one end of the membrane to which binding agent is bound is immersed in a solution containing the sample. The sample migrates along the membrane through a region containing second binding agent and to the area of immobilized binding agent. Concentration of second binding agent at the area of immobilized antibody indicates the presence of a cancer. Typically, the concentration of second binding agent at that site generates a pattern, such as a line, that can be read visually. The absence of such a pattern indicates a negative result. In general, the amount of binding agent immobilized on the membrane is selected to generate a visually discernible pattern when the biological sample contains a level of polypeptide that would be sufficient to generate a positive signal in the two-antibody sandwich assay, in the format discussed above. Preferred binding agents for use in such assays are antibodies and antigen-binding fragments thereof. Preferably, the amount of antibody immobilized on the membrane ranges from about 25 ng to about 1 μg, and more preferably from about 50 ng to about 500 ng. Such tests can typically be performed with a very small amount of biological sample.

[0915] Of course, numerous other assay protocols exist that are suitable for use with the tumor proteins or binding agents of the present invention. The above descriptions are intended to be exemplary only. For example, it will be apparent to those of ordinary skill in the art that the above protocols may be readily modified to use tumor polypeptides to detect antibodies that bind to such polypeptides in a biological sample. The detection of such tumor protein specific antibodies may correlate with the presence of a cancer.

[0916] A cancer may also, or alternatively, be detected based on the presence of T cells that specifically react with a tumor protein in a biological sample. Within certain methods, a biological sample comprising CD4⁺and/or CD8⁺T cells isolated from a patient is incubated with a tumor polypeptide, a polynucleotide encoding such a polypeptide and/or an APC that expresses at least an immunogenic portion of such a polypeptide, and the presence or absence of specific activation of the T cells is detected. Suitable biological samples include, but are not limited to, isolated T cells. For example, T cells may be isolated from a patient by routine techniques (such as by Ficoll/Hypaque density gradient centrifugation of peripheral blood lymphocytes). T cells may be incubated in vitro for 2-9 days (typically 4 days) at 37° C. with polypeptide (e.g., 5-25 μg/ml). It may be desirable to incubate another aliquot of a T cell sample in the absence of tumor polypeptide to serve as a control. For CD4⁺T cells, activation is preferably detected by evaluating proliferation of the T cells. For CD8⁺T cells, activation is preferably detected by evaluating cytolytic activity. A level of proliferation that is at least two fold greater and/or a level of cytolytic activity that is at least 20% greater than in disease-free patients indicates the presence of a cancer in the patient.

[0917] As noted above, a cancer may also, or alternatively, be detected based on the level of mRNA encoding a tumor protein in a biological sample. For example, at least two oligonucleotide primers may be employed in a polymerase chain reaction (PCR) based assay to amplify a portion of a tumor cDNA derived from a biological sample, wherein at least one of the oligonucleotide primers is specific for (i.e., hybridizes to) a polynucleotide encoding the tumor protein. The amplified cDNA is then separated and detected using techniques well known in the art, such as gel electrophoresis. Similarly, oligonucleotide probes that specifically hybridize to a polynucleotide encoding a tumor protein may be used in a hybridization assay to detect the presence of polynucleotide encoding the tumor protein in a biological sample.

[0918] To permit hybridization under assay conditions, oligonucleotide primers and probes should comprise an oligonucleotide sequence that has at least about 60%, preferably at least about 75% and more preferably at least about 90%, identity to a portion of a polynucleotide encoding a tumor protein of the invention that is at least 10 nucleotides, and preferably at least 20 nucleotides, in length. Preferably, oligonucleotide primers and/or probes hybridize to a polynucleotide encoding a polypeptide described herein under moderately stringent conditions, as defined above. Oligonucleotide primers and/or probes which may be usefully employed in the diagnostic methods described herein preferably are at least 10-40 nucleotides in length. In a preferred embodiment, the oligonucleotide primers comprise at least 10 contiguous nucleotides, more preferably at least 15 contiguous nucleotides, of a DNA molecule having a sequence as disclosed herein. Techniques for both PCR based assays and hybridization assays are well known in the art (see, for example, Mullis et al., Cold Spring Harbor Symp. Quant. Biol., 51:263, 1987; Erlich ed., PCR Technology, Stockton Press, NY, 1989).

[0919] One preferred assay employs RT-PCR, in which PCR is applied in conjunction with reverse transcription. Typically, RNA is extracted from a biological sample, such as biopsy tissue, and is reverse transcribed to produce cDNA molecules. PCR amplification using at least one specific primer generates a cDNA molecule, which may be separated and visualized using, for example, gel electrophoresis. Amplification may be performed on biological samples taken from a test patient and from an individual who is not afflicted with a cancer. The amplification reaction may be performed on several dilutions of cDNA spanning two orders of magnitude. A two-fold or greater increase in expression in several dilutions of the test patient sample as compared to the same dilutions of the non-cancerous sample is typically considered positive.

[0920] In another embodiment, the compositions described herein may be used as markers for the progression of cancer. In this embodiment, assays as described above for the diagnosis of a cancer may be performed over time, and the change in the level of reactive polypeptide(s) or polynucleotide(s) evaluated. For example, the assays may be performed every 24-72 hours for a period of 6 months to 1 year, and thereafter performed as needed. In general, a cancer is progressing in those patients in whom the level of polypeptide or polynucleotide detected increases over time. In contrast, the cancer is not progressing when the level of reactive polypeptide or polynucleotide either remains constant or decreases with time.

[0921] Certain in vivo diagnostic assays may be performed directly on a tumor. One such assay involves contacting tumor cells with a binding agent. The bound binding agent may then be detected directly or indirectly via a reporter group. Such binding agents may also be used in histological applications. Alternatively, polynucleotide probes may be used within such applications.

[0922] As noted above, to improve sensitivity, multiple tumor protein markers may be assayed within a given sample. It will be apparent that binding agents specific for different proteins provided herein may be combined within a single assay. Further, multiple primers or probes may be used concurrently. The selection of tumor protein markers may be based on routine experiments to determine combinations that results in optimal sensitivity. In addition, or alternatively, assays for tumor proteins provided herein may be combined with assays for other known tumor antigens.

[0923] The present invention farther provides kits for use within any of the above diagnostic methods. Such kits typically comprise two or more components necessary for performing a diagnostic assay. Components may be compounds, reagents, containers and/or equipment. For example, one container within a kit may contain a monoclonal antibody or fragment thereof that specifically binds to a tumor protein. Such antibodies or fragments may be provided attached to a support material, as described above. One or more additional containers may enclose elements, such as reagents or buffers, to be used in the assay. Such kits may also, or alternatively, contain a detection reagent as described above that contains a reporter group suitable for direct or indirect detection of antibody binding.

[0924] Alternatively, a kit may be designed to detect the level of mRNA encoding a tumor protein in a biological sample. Such kits generally comprise at least one oligonucleotide probe or primer, as described above, that hybridizes to a polynucleotide encoding a tumor protein. Such an oligonucleotide may be used, for example, within a PCR or hybridization assay. Additional components that may be present within such kits include a second oligonucleotide and/or a diagnostic reagent or container to facilitate the detection of a polynucleotide encoding a tumor protein.

[0925] The following Examples are offered by way of illustration and not by way of limitation.

### EXAMPLES

### Example 1

### Isolation and Characterization of Prostate-Specific Polypeptides

[0926] This Example describes the isolation of certain prostate-specific polypeptides from a prostate tumor cDNA library.

[0927] A human prostate tumor cDNA expression library was constructed from prostate tumor poly A⁺RNA using a Superscript Plasmid System for cDNA Synthesis and Plasmid Cloning kit (BRL Life Technologies, Gaithersburg, Md. 20897) following the manufacturer's protocol. Specifically, prostate tumor tissues were homogenized with polytron (Kinematica, Switzerland) and total RNA was extracted using Trizol reagent (BRL Life Technologies) as directed by the manufacturer. The poly A⁺RNA was then purified using a Qiagen oligotex spin column MRNA purification kit (Qiagen, Santa Clarita, Calif. 91355) according to the manufacturer's protocol. First-strand cDNA was synthesized using the NotI/Oligo-dT18 primer. Double-stranded cDNA was synthesized, ligated with EcoRI/BAXI adaptors (Invitrogen, San Diego, Calif.) and digested with NotI. Following size fractionation with Chroma Spin-1000 columns (Clontech, Palo Alto, Calif.), the cDNA was ligated into the EcoRI/NotI site of pcDNA3.1 (Invitrogen) and transformed into ElectroMax E. coli DH10B cells (BRL Life Technologies) by electroporation.

[0928] Using the same procedure, a normal human pancreas cDNA expression library was prepared from a pool of six tissue specimens (Clontech). The cDNA libraries were characterized by determining the number of independent colonies, the percentage of clones that carried insert, the average insert size and by sequence analysis. The prostate tumor library contained 1.64×10⁷ independent colonies, with 70% of clones having an insert and the average insert size being 1745 base pairs. The normal pancreas cDNA library contained 3.3×10⁶ independent colonies, with 69% of clones having inserts and the average insert size being 1120 base pairs. For both libraries, sequence analysis showed that the majority of clones had a full length cDNA sequence and were synthesized from mRNA, with minimal rRNA and mitochondrial DNA contamination. cDNA library subtraction was performed using the above prostate tumor and normal pancreas cDNA libraries, as described by Hara et al. (Blood, 84:189-199, 1994) with some modifications. Specifically, a prostate tumor-specific subtracted cDNA library was generated as follows. Normal pancreas cDNA library (70 μg) was digested with EcoRI, NotI, and SfuI, followed by a filling-in reaction with DNA polymerase Klenow fragment. After phenol-chloroform extraction and ethanol precipitation, the DNA was dissolved in 100 μl of H₂O, heat-denatured and mixed with 100 μl (100 μg) of Photoprobe biotin (Vector Laboratories, Burlingame, Calif.). As recommended by the manufacturer, the resulting mixture was irradiated with a 270 W sunlamp on ice for 20 minutes. Additional Photoprobe biotin (50 μl) was added and the biotinylation reaction was repeated. After extraction with butanol five times, the DNA was ethanol-precipitated and dissolved in 23 μl H₂O to form the driver DNA.

[0929] To form the tracer DNA, 10 μg prostate tumor cDNA library was digested with BamHI and XhoI, phenol chloroform extracted and passed through Chroma spin-400 columns (Clontech). Following ethanol precipitation, the tracer DNA was dissolved in 5 μl H₂O. Tracer DNA was mixed with 15 μl driver DNA and 20 μl of 2× hybridization buffer (1.5 M NaCl/10 mM EDTA/50 mM HEPES pH 7.5/0.2% sodium dodecyl sulfate), overlaid with mineral oil, and heat-denatured completely. The sample was immediately transferred into a 68° C. water bath and incubated for 20 hours (long hybridization [LH]). The reaction mixture was then subjected to a streptavidin treatment followed by phenol/chloroform extraction. This process was repeated three more times. Subtracted DNA was precipitated, dissolved in 12 μl H₂O, mixed with 8 μl driver DNA and 20 μl of 2× hybridization buffer, and subjected to a hybridization at 68° C. for 2 hours (short hybridization [SH]). After removal of biotinylated double-stranded DNA, subtracted cDNA was ligated into BamHI/XhoI site of chloramphenicol resistant pBCSK⁺(Stratagene, La Jolla, Calif. 92037) and transformed into ElectroMax E. coli DH10B cells by electroporation to generate a prostate tumor specific subtracted cDNA library (referred to as “prostate subtraction 1”).

[0930] To analyze the subtracted cDNA library, plasmid DNA was prepared from 100 independent clones, randomly picked from the subtracted prostate tumor specific library and grouped based on insert size. Representative cDNA clones were further characterized by DNA sequencing with a Perkin Elmer/Applied Biosystems Division Automated Sequencer Model 373A (Foster City, Calif.). Six cDNA clones, hereinafter referred to as F1-13, F1-12, F1-16, H1-1, H1-9 and H1-4, were shown to be abundant in the subtracted prostate-specific cDNA library. The determined 3′ and 5′ cDNA sequences for F1-12 are provided in SEQ ID NO: 2 and 3, respectively, with determined 3′ cDNA sequences for F1-13, F1-16, H1-1, H1-9 and H1-4 being provided in SEQ ID NO: 1 and 4-7, respectively.

[0931] The cDNA sequences for the isolated clones were compared to known sequences in the gene bank using the EMBL and GenBank databases (release 96). Four of the prostate tumor cDNA clones, F1-13, F1-16, H1-1, and H1-4, were determined to encode the following previously identified proteins: prostate specific antigen (PSA), human glandular kallikrein, human tumor expression enhanced gene, and mitochondria cytochrome C oxidase subunit II. H1-9 was found to be identical to a previously identified human autonomously replicating sequence. No significant homologies to the cDNA sequence for F1-12 were found.

[0932] Subsequent studies led to the isolation of a full-length cDNA sequence for F1-12 (also referred to as P504S). This sequence is provided in SEQ ID NO: 107, with the corresponding amino acid sequence being provided in SEQ ID NO: 108. cDNA splice variants of P504S are provided in SEQ ID NO: 600-605.

[0933] To clone less abundant prostate tumor specific genes, cDNA library subtraction was performed by subtracting the prostate tumor cDNA library described above with the normal pancreas cDNA library and with the three most abundant genes in the previously subtracted prostate tumor specific cDNA library: human glandular kallikrein, prostate specific antigen (PSA), and mitochondria cytochrome C oxidase subunit II. Specifically, 1 μg each of human glandular kallikrein, PSA and mitochondria cytochrome C oxidase subunit II cDNAs in pcDNA3.1 were added to the driver DNA and subtraction was performed as described above to provide a second subtracted cDNA library hereinafter referred to as the “subtracted prostate tumor specific cDNA library with spike”.

[0934] Twenty-two cDNA clones were isolated from the subtracted prostate tumor specific cDNA library with spike. The determined 3′ and 5′ cDNA sequences for the clones referred to as J1-17, L1-12, N1-1862, J1-13, J1-19, J1-25, J1-24, K1-58, K1-63, L1-4 and L1-14 are provided in SEQ ID NOS: 8-9, 10-11, 12-13, 14-15, 16-17, 18-19, 20-21, 22-23, 24-25, 26-27 and 28-29, respectively. The determined 3′ cDNA sequences for the clones referred to as J1-12, J1-16, J1-21, K1-48, K1-55, L1-2, L1-6, N1-1858, N1-1860, N1-1861, N1-1864 are provided in SEQ ID NOS: 30-40, respectively. Comparison of these sequences with those in the gene bank as described above, revealed no significant homologies to three of the five most abundant DNA species, (J1-17, L1-12 and N1-1862; SEQ ID NOS: 8-9, 10-11 and 12-13, respectively). Of the remaining two most abundant species, one (J1-12; SEQ ID NO: 30) was found to be identical to the previously identified human pulmonary surfactant-associated protein, and the other (K1-48; SEQ ID NO: 33) was determined to have some homology to R. norvegicus mRNA for 2-arylpropionyl-CoA epimerase. Of the 17 less abundant cDNA clones isolated from the subtracted prostate tumor specific cDNA library with spike, four (J1-16, K1-55, L1-6 and N1-1864; SEQ ID NOS: 31, 34, 36 and 40, respectively) were found to be identical to previously identified sequences, two (J1-21 and N1-1860; SEQ ID NOS: 32 and 38, respectively) were found to show some homology to non-human sequences, and two (L1-2 and N1-1861; SEQ ID NOS: 35 and 39, respectively) were found to show some homology to known human sequences. No significant homologies were found to the polypeptides J1-13, J1-19, J1-24, J1-25, K1-58, K1-63, L1-4, L1-14 (SEQ ID NOS: 14-15, 16-17, 20-21, 18-19, 22-23, 24-25, 26-27, 28-29, respectively).

[0935] Subsequent studies led to the isolation of full length cDNA sequences for J1-17, L1-12 and N1-1862 (SEQ ID NOS: 109-111, respectively). The corresponding amino acid sequences are provided in SEQ ID NOS: 112-114. L1-12 is also referred to as P501S. A cDNA splice variant of P501S is provided in SEQ ID NO: 606.

[0936] As described below, N1-1862 (also referred to as P503S; SEQ ID NO: 111) was found to show prostate-specific expression. Immunohistochemistry and flow cytometery analysis indicated that P503S is a plasma membrane-associated molecule. P503S contains four transmembrane domains predicted to be encoded by amino acids 59-75, 90-106, 107-123 and 218-234. P503S contains a cleavable N-terminal signal sequence at amino acids 1-29. The N-terminus of P503S encoding amino acids 1-58 is internal, amino acids 76-89 are extracellular, amino acids 124-217 are extracellular and amino acids 235-241 are intracellular. Potential N-linked glycosylation sites are at amino acids N-141, N154, N-178 and N-184. Glycosylation of P503S has been confirmed experimentally using enzymes that selectively strip sugar residues from protein and Western blot analysis. P503S is a member of a family of molecules collectively known as the tetraspanin family or TM4SF (transmembrane 4 superfamily). This family of proteins has been shown to interact, and homo and heterodimerize with, other family members. Furthermore, the TM4SF family members associate with a family of adhesion molecules known as integrins. TM4SF family members have been shown to regulate cell adhesion as well as cell proliferation by controlling signal transduction pathways associated with these physiological responses.

[0937] In a further experiment, four additional clones were identified by subtracting a prostate tumor cDNA library with normal prostate cDNA prepared from a pool of three normal prostate poly A+ RNA (referred to as “prostate subtraction 2”). The determined cDNA sequences for these clones, hereinafter referred to as U1-3064, U1-3065, V1-3692 and 1A-3905, are provided in SEQ ID NO: 69-72, respectively. Comparison of the determined sequences with those in the gene bank revealed no significant homologies to U1-3065.

[0938] A second subtraction with spike (referred to as “prostate subtraction spike 2”) was performed by subtracting a prostate tumor specific cDNA library with spike with normal pancreas cDNA library and further spiked with PSA, J1-17, pulmonary surfactant-associated protein, mitochondrial DNA, cytochrome c oxidase subunit II, N1-1862, autonomously replicating sequence, L1-12 and tumor expression enhanced gene. Four additional clones, hereinafter referred to as V1-3686, R1-2330, 1B-3976 and V1-3679, were isolated. The determined cDNA sequences for these clones are provided in SEQ ID NO: 73-76, respectively. Comparison of these sequences with those in the gene bank revealed no significant homologies to V1-3686 and R1-2330.

[0939] Further analysis of the three prostate subtractions described above (prostate subtraction 2, subtracted prostate tumor specific cDNA library with spike, and prostate subtraction spike 2) resulted in the identification of sixteen additional clones, referred to as 1G-4736, 1G-4738, 1G-4741, 1G-4744, 1G-4734, 1H-4774, 1H-4781, 1H-4785, 1H-4787, 1H-4796, 1I-4810, 11-4811, 1J-4876, 1K-4884 and 1K-4896. The determined cDNA sequences for these clones are provided in SEQ ID NOS: 77-92, respectively. Comparison of these sequences with those in the gene bank as described above, revealed no significant homologies to 1G-4741, 1G-4734, 1I-4807, 1J-4876 and 1K-4896 (SEQ ID NOS: 79, 81, 87, 90 and 92, respectively). Further analysis of the isolated clones led to the determination of extended cDNA sequences for 1G-4736, 1G-4738, 1G-4741, 1G-4744, 1H-4774, 1H-4781, 1H-4785, 1H-4787, 1H-4796, 1I-4807, 1J-4876, 1K-4884 and 1K-4896, provided in SEQ ID NOS: 179-188 and 191-193, respectively, and to the determination of additional partial cDNA sequences for 1I-4810 and 1I-4811, provided in SEQ ID NOS: 189 and 190, respectively.

[0940] Additional studies with prostate subtraction spike 2 resulted in the isolation of three more clones. Their sequences were determined as described above and compared to the most recent GenBank. All three clones were found to have homology to known genes, which are Cysteine-rich protein, KIAA0242, and KIAA0280 (SEQ ID NO: 317, 319, and 320, respectively). Further analysis of these clones by Synteni microarray (Synteni, Palo Alto, Calif.) demonstrated that all three clones were over-expressed in most prostate tumors and prostate BPH, as well as in the majority of normal prostate tissues tested, but low expression in all other normal tissues.

[0941] An additional subtraction was performed by subtracting a normal prostate cDNA library with normal pancreas cDNA (referred to as “prostate subtraction 3”). This led to the identification of six additional clones referred to as 1G-4761, 1G-4762, 1H-4766, 1H-4770, 1H-4771 and 1H-4772 (SEQ ID NOS: 93-98). Comparison of these sequences with those in the gene bank revealed no significant homologies to 1G-4761 and 1H-4771 (SEQ ID NOS: 93 and 97, respectively). Further analysis of the isolated clones led to the determination of extended cDNA sequences for 1G-4761, 1G-4762, 1H-4766 and 1H-4772 provided in SEQ ID NOS: 194-196 and 199, respectively, and to the determination of additional partial cDNA sequences for 1H-4770 and 1H-4771, provided in SEQ ID NOS: 197 and 198, respectively.

[0942] Subtraction of a prostate tumor cDNA library, prepared from a pool of polyA+ RNA from three prostate cancer patients, with a normal pancreas cDNA library (prostate subtraction 4) led to the identification of eight clones, referred to as 1D-4297, 1D-4309, 1D.1-4278, 1D-4288, 1D-4283, 1D-4304, 1D-4296 and 1D-4280 (SEQ ID NOS: 99-107). These sequences were compared to those in the gene bank as described above. No significant homologies were found to 1D-4283 and 1D-4304 (SEQ ID NOS: 103 and 104, respectively). Further analysis of the isolated clones led to the determination of extended cDNA sequences for 1D-4309, 1D.1-4278, 1D-4288, 1D-4283, 1D-4304, 1D-4296 and 1D-4280, provided in SEQ ID NOS: 200-206, respectively.

[0943] cDNA clones isolated in prostate subtraction 1 and prostate subtraction 2, described above, were colony PCR amplified and their mRNA expression levels in prostate tumor, normal prostate and in various other normal tissues were determined using microarray technology (Synteni, Palo Alto, Calif.). Briefly, the PCR amplification products were dotted onto slides in an array format, with each product occupying a unique location in the array. mRNA was extracted from the tissue sample to be tested, reverse transcribed, and fluorescent-labeled cDNA probes were generated. The microarrays were probed with the labeled cDNA probes, the slides scanned and fluorescence intensity was measured. This intensity correlates with the hybridization intensity. Two clones (referred to as P509S and P510S) were found to be over-expressed in prostate tumor and normal prostate and expressed at low levels in all other normal tissues tested (liver, pancreas, skin, bone marrow, brain, breast, adrenal gland, bladder, testes, salivary gland, large intestine, kidney, ovary, lung, spinal cord, skeletal muscle and colon). The determined cDNA sequences for P509S and P510S are provided in SEQ ID NO: 223 and 224, respectively. Comparison of these sequences with those in the gene bank as described above, revealed some homology to previously identified ESTs.

[0944] Additional, studies led to the isolation of the full-length cDNA sequence for P509S. This sequence is provided in SEQ ID NO: 332, with the corresponding amino acid sequence being provided in SEQ ID NO: 339. Two variant full-length cDNA sequences for P510S are provided in SEQ ID NO: 535 and 536, with the corresponding amino acid sequences being provided in SEQ ID NO: 537 and 538, respectively. Additional splice variants of P510S are provided in SEQ ID NO: 598 and 599. P510S was found to be expressed in a prostate-specific manner. Immunohistochemistry and flow cytometry analysis indicated that P510S is a plasma membrane-associated molecule. Based on sequence similarity to other multidrug resistance-associated transporter proteins, P510S is predicted to be a cell surface expressed drug transport protein that contains an ATP binding cassette. P510S contains nine transmembrane domains predicted to be encoded by amino acids 135-151, 233-249, 330-346, 351-367, 711-727, 775-791, 850-866, 867-883 and 954-970. The C-terminus of P510S is predicted to be intracellular. Potential N-linked glycosylation sites are at amino acids N-651, N-690, N-746 and N754, N792, N-1176 and N-1312.

[0945] The determined cDNA sequences for additional prostate-specific clones isolated during characterization of prostate specific cDNA libraries are provided in SEQ ID NO: 618-689, 691-697 and 709-772. Comparison of these sequences with those in the public databases revealed no significant homologies to any of these sequences.

### Example 2

### Determination of Tissue Specificity of Prostate-Specific Polypeptides

[0946] Using gene specific primers, mRNA expression levels for the representative prostate-specific polypeptides F1-16, H1-1, J1-17 (also referred to as P502S), L1-12 (also referred to as P501S), F1-12 (also referred to as P504S) and N1-1862 (also referred to as P503S) were examined in a variety of normal and tumor tissues using RT-PCR.

[0947] Briefly, total RNA was extracted from a variety of normal and tumor tissues using Trizol reagent as described above. First strand synthesis was carried out using 1-2 μg of total RNA with SuperScript II reverse transcriptase (BRL Life Technologies) at 42° C. for one hour. The cDNA was then amplified by PCR with gene-specific primers. To ensure the semi-quantitative nature of the RT-PCR, β-actin was used as an internal control for each of the tissues examined. First, serial dilutions of the first strand cDNAs were prepared and RT-PCR assays were performed using β-actin specific primers. A dilution was then chosen that enabled the linear range amplification of the β-actin template and which was sensitive enough to reflect the differences in the initial copy numbers. Using these conditions, the β-actin levels were determined for each reverse transcription reaction from each tissue. DNA contamination was minimized by DNase treatment and by assuring a negative PCR result when using first strand cDNA that was prepared without adding reverse transcriptase. mRNA Expression levels were examined in four different types of tumor tissue (prostate tumor from 2 patients, breast tumor from 3 patients, colon tumor, lung tumor), and sixteen different normal tissues, including prostate, colon, kidney, liver, lung, ovary, pancreas, skeletal muscle, skin, stomach, testes, bone marrow and brain. F1-16 was found to be expressed at high levels in prostate tumor tissue, colon tumor and normal prostate, and at lower levels in normal liver, skin and testes, with expression being undetectable in the other tissues examined. H1-1 was found to be expressed at high levels in prostate tumor, lung tumor, breast tumor, normal prostate, normal colon and normal brain, at much lower levels in normal lung, pancreas, skeletal muscle, skin, small intestine, bone marrow, and was not detected in the other tissues tested. J1-17 (P502S) and L1-12 (P501S) appear to be specifically over-expressed in prostate, with both genes being expressed at high levels in prostate tumor and normal prostate but at low to undetectable levels in all the other tissues examined. N1-1862 (P503S) was found to be over-expressed in 60% of prostate tumors and detectable in normal colon and kidney. The RT-PCR results thus indicate that F1-16, H1-1, J1-17 (P502S), N1-1862 (P503S) and L1-12 (P501S) are either prostate specific or are expressed at significantly elevated levels in prostate.

[0948] Further RT-PCR studies showed that F1-12 (P504S) is over-expressed in 60% of prostate tumors, detectable in normal kidney but not detectable in all other tissues tested. Similarly, R1-2330 was shown to be over-expressed in 40% of prostate tumors, detectable in normal kidney and liver, but not detectable in all other tissues tested. U1-3064 was found to be over-expressed in 60% of prostate tumors, and also expressed in breast and colon tumors, but was not detectable in normal tissues.

[0949] RT-PCR characterization of R1-2330, U1-3064 and 1D-4279 showed that these three antigens are over-expressed in prostate and/or prostate tumors.

[0950] Northern analysis with four prostate tumors, two normal prostate samples, two BPH prostates, and normal colon, kidney, liver, lung, pancrease, skeletal muscle, brain, stomach, testes, small intestine and bone marrow, showed that L1-12 (P501S) is over-expressed in prostate tumors and normal prostate, while being undetectable in other normal tissues tested. J1-17 (P502S) was detected in two prostate tumors and not in the other tissues tested. N1-1862 (P503S) was found to be over-expressed in three prostate tumors and to be expressed in normal prostate, colon and kidney, but not in other tissues tested. F1-12 (P504S) was found to be highly expressed in two prostate tumors and to be undetectable in all other tissues tested.

[0951] The microarray technology described above was used to determine the expression levels of representative antigens described herein in prostate tumor, breast tumor and the following normal tissues: prostate, liver, pancreas, skin, bone marrow, brain, breast, adrenal gland, bladder, testes, salivary gland, large intestine, kidney, ovary, lung, spinal cord, skeletal muscle and colon. L1-12 (P501S) was found to be over-expressed in normal prostate and prostate tumor, with some expression being detected in normal skeletal muscle. Both J1-12 and F1-12 (P504S) were found to be over-expressed in prostate tumor, with expression being lower or undetectable in all other tissues tested. N1-1862 (P503S) was found to be expressed at high levels in prostate tumor and normal prostate, and at low levels in normal large intestine and normal colon, with expression being undetectable in all other tissues tested. R1-2330 was found to be over-expressed in prostate tumor and normal prostate, and to be expressed at lower levels in all other tissues tested. 1D-4279 was found to be over-expressed in prostate tumor and normal prostate, expressed at lower levels in normal spinal cord, and to be undetectable in all other tissues tested.

[0952] Further microarray analysis to specifically address the extent to which P501S (SEQ ID NO: 110) was expressed in breast tumor revealed moderate over-expression not only in breast tumor, but also in metastatic breast tumor (2/31), with negligible to low expression in normal tissues. This data suggests that P501S may be over-expressed in various breast tumors as well as in prostate tumors.

[0953] The expression levels of 32 ESTs (expressed sequence tags) described by Vasmatzis et al. (Proc. Natl. Acad. Sci. USA 95:300-304, 1998) in a variety of tumor and normal tissues were examined by microarray technology as described above. Two of these clones (referred to as P1000C and P1001C) were found to be over-expressed in prostate tumor and normal prostate, and expressed at low to undetectable levels in all other tissues tested (normal aorta, thymus, resting and activated PBMC, epithelial cells, spinal cord, adrenal gland, fetal tissues, skin, salivary gland, large intestine, bone marrow, liver, lung, dendritic cells, stomach, lymph nodes, brain, heart, small intestine, skeletal muscle, colon and kidney. The determined cDNA sequences for P1000C and P1C are provided in SEQ ID NO: 384 and 472, respectively. The sequence of P1001C was found to show some homology to the previously isolated Human mRNA for JM27 protein. Subsequent comparison of the sequence of SEQ ID NO: 384 with sequences in the public databases, led to the identification of a full-length cDNA sequence of P1000C (SEQ ID NO: 929), which encodes a 492 amino acid sequence. Analysis of the amino acid sequence using the PSORT II program led to the identification of a putative transmembrane domain from amino acids 84-100. The cDNA sequence of the open reading frame of P1000C, including the stop codon, is provided in SEQ ID NO: 930, with the open reading frame without the stop codon being provided in SEQ ID NO: 931. The full-length amino acid sequence of P1000C is provided in SEQ ID NO: 932. SEQ ID NO: 933 and 934 represent amino acids 1-100 and 100-492 of P1000C, respectively.

[0954] The expression of the polypeptide encoded by the full length cDNA sequence for F1-12 (also referred to as P504S; SEQ ID NO: 108) was investigated by immunohistochemical analysis. Rabbit-anti-P504S polyclonal antibodies were generated against the full length P504S protein by standard techniques. Subsequent isolation and characterization of the polyclonal antibodies were also performed by techniques well known in the art. Immunohistochemical analysis showed that the P504S polypeptide was expressed in 100% of prostate carcinoma samples tested (n=5).

[0955] The rabbit-anti-P504S polyclonal antibody did not appear to label benign prostate cells with the same cytoplasmic granular staining, but rather with light nuclear staining. Analysis of normal tissues revealed that the encoded polypeptide was found to be expressed in some, but not all normal human tissues. Positive cytoplasmic staining with rabbit-anti-P504S polyclonal antibody was found in normal human kidney, liver, brain, colon and lung-associated macrophages, whereas heart and bone marrow were negative.

[0956] This data indicates that the P504S polypeptide is present in prostate cancer tissues, and that there are qualitative and quantitative differences in the staining between benign prostatic hyperplasia tissues and prostate cancer tissues, suggesting that this polypeptide may be detected selectively in prostate tumors and therefore be useful in the diagnosis of prostate cancer.

### Example 3

### Isolation and Charaacterization of Prostate-Specific Polypeptides by Pcr-Based Subtraction

[0957] A cDNA subtraction library, containing cDNA from normal prostate subtracted with ten other normal tissue cDNAs (brain, heart, kidney, liver, lung, ovary, placenta, skeletal muscle, spleen and thymus) and then submitted to a first round of PCR amplification, was purchased from Clontech. This library was subjected to a second round of PCR amplification, following the manufacturer's protocol. The resulting cDNA fragments were subcloned into the vector pT7 Blue T-vector (Novagen, Madison, Wis.) and transformed into XL-1 Blue MRF' E. coli (Stratagene). DNA was isolated from independent clones and sequenced using a Perkin Elmer/Applied Biosystems Division Automated Sequencer Model 373A.

[0958] Fifty-nine positive clones were sequenced. Comparison of the DNA sequences of these clones with those in the gene bank, as described above, revealed no significant homologies to 25 of these clones, hereinafter referred to as P5, P8, P9, P18, P20, P30, P34, P36, P38, P39, P42, P49, P50, P53, P55, P60, P64, P65, P73, P75, P76, P79, and P84. The determined cDNA sequences for these clones are provided in SEQ ID NO: 41-45, 47-52 and 54-65, respectively. P29, P47, P68, P80 and P82 (SEQ ID NO: 46, 53 and 66-68, respectively) were found to show some degree of homology to previously identified DNA sequences. To the best of the inventors'knowledge, none of these sequences have been previously shown to be present in prostate.

[0959] Further studies employing the sequence of SEQ ID NO: 67 as a probe in standard full-length cloning methods, resulted in the isolation of three cDNA sequences which appear to be splice variants of P80 (also known as P704P). These sequences are provided in SEQ ID NO: 699-701.

[0960] Further studies using the PCR-based methodology described above resulted in the isolation of more than 180 additional clones, of which 23 clones were found to show no significant homologies to known sequences. The determined cDNA sequences for these clones are provided in SEQ ID NO: 115-123, 127, 131, 137, 145, 147-151, 153, 156-158 and 160. Twenty-three clones (SEQ ID NO: 124-126, 128-130, 132-136, 138-144, 146, 152, 154, 155 and 159) were found to show some homology to previously identified ESTs. An additional ten clones (SEQ ID NO: 161-170) were found to have some degree of homology to known genes. Larger cDNA clones containing the P20 sequence represent splice variants of a gene referred to as P703P. The determined DNA sequence for the variants referred to as DE1, DE13 and DE14 are provided in SEQ ID NOS: 171, 175 and 177, respectively, with the corresponding amino acid sequences being provided in SEQ ID NO: 172, 176 and 178, respectively. The determined cDNA sequence for an extended spliced form of P703 is provided in SEQ ID NO: 225. The DNA sequences for the splice variants referred to as DE2 and DE6 are provided in SEQ ID NOS: 173 and 174, respectively.

[0961] mRNA Expression levels for representative clones in tumor tissues (prostate (n=5), breast (n=2), colon and lung) normal tissues (prostate (n=5), colon, kidney, liver, lung (n=2), ovary (n=2), skeletal muscle, skin, stomach, small intestine and brain), and activated and non-activated PBMC was determined by RT-PCR as described above. Expression was examined in one sample of each tissue type unless otherwise indicated.

[0962] P9 was found to be highly expressed in normal prostate and prostate tumor compared to all normal tissues tested except for normal colon which showed comparable expression. P20, a portion of the P703P gene, was found to be highly expressed in normal prostate and prostate tumor, compared to all twelve normal tissues tested. A modest increase in expression of P20 in breast tumor (n=2), colon tumor and lung tumor was seen compared to all normal tissues except lung (1 of 2). Increased expression of P 18 was found in normal prostate, prostate tumor and breast tumor compared to other normal tissues except lung and stomach. A modest increase in expression of P5 was observed in normal prostate compared to most other normal tissues. However, some elevated expression was seen in normal lung and PBMC. Elevated expression of P5 was also observed in prostate tumors (2 of 5), breast tumor and one lung tumor sample. For P30, similar expression levels were seen in normal prostate and prostate tumor, compared to six of twelve other normal tissues tested. Increased expression was seen in breast tumors, one lung tumor sample and one colon tumor sample, and also in normal PBMC. P29 was found to be over-expressed in prostate tumor (5 of 5) and normal prostate (5 of 5) compared to the majority of normal tissues. However, substantial expression of P29 was observed in normal colon and normal lung (2 of 2). P80 was found to be over-expressed in prostate tumor (5 of 5) and normal prostate (5 of 5) compared to all other normal tissues tested, with increased expression also being seen in colon tumor.

[0963] Further studies resulted in the isolation of twelve additional clones, hereinafter referred to as 10-d8, 10-h10, 11-c8, 7-g6, 8-b5, 8-b6, 8-d4, 8-d9, 8-g3, 8-h11, 9-f12 and 9-f3. The determined DNA sequences for 10-d8, 10-h10, 11-c8, 8-d4, 8-d9, 8-h11, 9-f12 and 9-f3 are provided in SEQ ID NO: 207, 208, 209, 216, 217, 220, 221 and 222, respectively. The determined forward and reverse DNA sequences for 7-g6, 8-b5, 8-b6 and 8-g3 are provided in SEQ ID NO: 210 and 211; 212 and 213; 214 and 215; and 218 and 219, respectively. Comparison of these sequences with those in the gene bank revealed no significant homologies to the sequence of 9-f3. The clones 10-d8, 11-c8 and 8-h11 were found to show some homology to previously isolated ESTs, while 10-h10, 8-b5, 8-b6, 8-d4, 8-d9, 8-g3 and 9-f12 were found to show some homology to previously identified genes. Further characterization of 7-G6 and 8-G3 showed identity to the known genes PAP and PSA, respectively. mRNA expression levels for these clones were determined using the micro-array technology described above. The clones 7-G6, 8-G3, 8-B5, 8-B6, 8-D4, 8-D9, 9-F3, 9-F12, 9-H3, 10-A2, 10-A4, 11-C9 and 11-F2 were found to be over-expressed in prostate tumor and normal prostate, with expression in other tissues tested being low or undetectable. Increased expression of 8-F11 was seen in prostate tumor and normal prostate, bladder, skeletal muscle and colon. Increased expression of 10-H10 was seen in prostate tumor and normal prostate, bladder, lung, colon, brain and large intestine. Increased expression of 9-B1 was seen in prostate tumor, breast tumor, and normal prostate, salivary gland, large intestine and skin, with increased expression of 11-C8 being seen in prostate tumor, and normal prostate and large intestine.

[0964] An additional cDNA fragment derived from the PCR-based normal prostate subtraction, described above, was found to be prostate specific by both micro-array technology and RT-PCR. The determined cDNA sequence of this clone (referred to as 9-A11) is provided in SEQ ID NO: 226. Comparison of this sequence with those in the public databases revealed 99% identity to the known gene HOXB13.

[0965] Further studies led to the isolation of the clones 8-C6 and 8-H7. The determined cDNA sequences for these clones are provided in SEQ ID NO: 227 and 228, respectively. These sequences were found to show some homology to previously isolated ESTs.

[0966] PCR and hybridization-based methodologies were employed to obtain longer cDNA sequences for clone P20 (also referred to as P703P), yielding three additional cDNA fragments that progressively extend the 5′ end of the gene. These fragments, referred to as P703PDE5, P703P6.26, and P703PX-23 (SEQ ID NO: 326, 328 and 330, with the corresponding amino acid sequences being provided in SEQ ID NO: 327, 329 and 331, respectively) contain additional 5′ sequence. P703PDE5 was recovered by screening of a cDNA library (#141-26) with a portion of P703P as a probe. P703P6.26 was recovered from a mixture of three prostate tumor cDNAs and P703PX_{—}23 was recovered from cDNA library (#438-48). Together, the additional sequences include all of the putative mature serine protease along with part of the putative signal sequence. The full-length cDNA sequence for P703P is provided in SEQ ID NO: 524, with the corresponding amino acid sequence being provided in SEQ ID NO: 525.

[0967] Using computer algorithms, the following regions of P703P were predicted to represent potential HLA A2-binding CTL epitopes: amino acids 164-172 of SEQ ID NO: 525 (SEQ ID NO: 866); amino acids 160-168 of SEQ ID NO: 525 (SEQ ID NO: 867); amino acids 239-247 of SEQ ID NO: 525 (SEQ ID NO: 868); amino acids 118-126 of SEQ ID NO: 525 (SEQ ID NO: 869); amino acids 112-120 of SEQ ID NO: 525 (SEQ ID NO: 870); amino acids 155-164 of SEQ ID NO: 525 (SEQ ID NO: 871); amino acids 117-126 of SEQ ID NO: 525 (SEQ ID NO: 872); amino acids 164-173 of SEQ ID NO: 525 (SEQ ID NO: 873); amino acids 154-163 of SEQ ID NO: 525 (SEQ ID NO: 874); amino acids 163-172 of SEQ ID NO: 525 (SEQ ID NO: 875); amino acids 58-66 of SEQ ID NO: 525 (SEQ ID NO: 876); and amino acids 59-67 of SEQ ID NO: 525 (SEQ ID NO: 877).

[0968] P703P was found to show some homology to previously identified proteases, such as thrombin. The thrombin receptor has been shown to be preferentially expressed in highly metastatic breast carcinoma cells and breast carcinoma biopsy samples. Introduction of thrombin receptor antisense cDNA has been shown to inhibit the invasion of metastatic breast carcinoma cells in culture. Antibodies against thrombin receptor inhibit thrombin receptor activation and thrombin-induced platelet activation. Furthermore, peptides that resemble the receptor's tethered ligand domain inhibit platelet aggregation by thrombin. P703P may play a role in prostate cancer through a protease-activated receptor on the cancer cell or on stromal cells. The potential trypsin-like protease activity of P703P may either activate a protease-activated receptor on the cancer cell membrane to promote tumorgenesis or activate a protease-activated receptor on the adjacent cells (such as stromal cells) to secrete growth factors and/or proteases (such as matrix metalloproteinases) that could promote tumor angiogenesis, invasion and metastasis. P703P may thus promote tumor progression and/or metastasis through the activation of protease-activated receptor. Polypeptides and antibodies that block the P703P-receptor interaction may therefore be usefully employed in the treatment of prostate cancer.

[0969] To determine whether P703P expression increases with increased severity of Gleason grade, an indicator of tumor stage, quantitative PCR analysis was performed on prostate tumor samples with a range of Gleason scores from 5 to >8. The mean level of P703P expression increased with increasing Gleason score, indicating that P703P expression may correlate with increased disease severity.

[0970] Further studies using a PCR-based subtraction library of a prostate tumor pool subtracted against a pool of normal tissues (referred to as JP: PCR subtraction) resulted in the isolation of thirteen additional clones, seven of which did not share any significant homology to known GenBank sequences. The determined cDNA sequences for these seven clones (P711P, P712P, novel 23, P774P, P775P, P710P and P768P) are provided in SEQ ID NO: 307-311; 313 and 315, respectively. The remaining six clones (SEQ ID NO: 316 and 321-325) were shown to share some homology to known genes. By microarray analysis, all thirteen clones showed three or more fold over-expression in prostate tissues, including prostate tumors, BPH and normal prostate as compared to normal non-prostate tissues. Clones P711P, P712P, novel 23 and P768P showed over-expression in most prostate tumors and BPH tissues tested (n=29), and in the majority of normal prostate tissues (n=4), but background to low expression levels in all normal tissues. Clones P774P, P775P and P710P showed comparatively lower expression and expression in fewer prostate tumors and BPH samples, with negative to low expression in normal prostate.

[0971] Further studies led to the isolation of an extended cDNA sequence for P712P (SEQ ID NO: 552). The amino acid sequences encoded by 16 predicted open reading frames present within the sequence of SEQ ID NO: 552 are provided in SEQ ID NO: 553-568.

[0972] The full-length cDNA for P711P was obtained by employing the partial sequence of SEQ ID NO: 307 to screen. a prostate cDNA library. Specifically, a directionally cloned prostate cDNA library was prepared using standard techniques. One million colonies of this library were plated onto LB/Amp plates. Nylon membrane filters were used to lift these colonies, and the cDNAs which were picked up by these filters were denatured and cross-linked to the filters by UV light. The P711P cDNA fragment of SEQ ID NO: 307 was radio-labeled and used to hybridize with these filters. Positive clones were selected, and cDNAs were prepared and sequenced using an automatic Perkin Elmer/Applied Biosystems sequencer. The determined full-length sequence of P711P is provided in SEQ ID NO: 382, with the corresponding amino acid sequence being provided in SEQ ID NO: 383.

[0973] Using PCR and hybridization-based methodologies, additional cDNA sequence information was derived for two clones described above, 11 -C9 and 9-F3, herein after referred to as P707P and P714P, respectively (SEQ ID NO: 333 and 334). After comparison with the most recent GenBank, P707P was found to be a splice variant of the known gene HoxB 13. In contrast, no significant homologies to P714P were found. Further studies employing the sequence of SEQ ID NO: 334 as a probe in standard full-length cloning methods, resulted in an extended cDNA sequence for P714P. This sequence is provided in SEQ ID NO: 698. This sequence was found to show some homology to the gene that encodes human ribosomal L23A protein.

[0974] Clones 8-B3, P89, P98, P130 and P201 (as disclosed in U.S. patent application Ser. No. 09/020,956, filed Feb. 9, 1998) were found to be contained within one contiguous sequence, referred to as P705P (cDNA sequence provided in SEQ ID NO: 335, with the amino acid sequence being provided in SEQ ID NO: 336), which was determined to be a splice variant of the known gene NKX 3.1. Subsequent studies led to the isolation of a corrected cDNA sequence for P705P. The coding region of this sequence is provided in SEQ ID NO: 948.

[0975] Further studies on P775P resulted in the isolation of four additional sequences (SEQ ID NO: 473-476) which are all splice variants of the P775P gene. The sequence of SEQ ID NO: 474 was found to contain two open reading frames (ORFs). The amino acid sequences encoded by these ORFs are provided in SEQ ID NO: 477 and 478. The cDNA sequence of SEQ ID NO: 475 was found to contain an ORF which encodes the amino acid sequence of SEQ ID NO: 479. The cDNA sequence of SEQ ID NO: 473 was found to contain four ORFs. The amino acid sequences encoded by these ORFs are provided in SEQ ID NO: 480-483. Additional splice variants of P775P are provided in SEQ ID NO: 593-597.

[0976] Subsequent studies led to the identification of a genomic region on chromosome 22ql 1.2, known as the Cat Eye Syndrome region, that contains the five prostate genes P704P, P712P, P774P, P775P and B305D. The relative location of each of these five genes within the genomic region is shown in FIG. 10. This region may therefore be associated with malignant tumors, and other potential tumor genes may be contained within this region. These studies also led to the identification of a potential open reading frame (ORF) for P775P (provided in SEQ ID NO: 533), which encodes the amino acid sequence of SEQ ID NO: 534.

[0977] Comparison of the clone of SEQ ID NO: 325 (referred to as P558S) with sequences in the GenBank and GeneSeq DNA databases showed that P558S is identical to the prostate-specific transglutaminase gene, which is known to have two forms. The full-length sequences for the two forms are provided in SEQ ID NO: 773 and 774, with the corresponding amino acid sequences being provided in SEQ ID NO: 775 and 776, respectively. The cDNA sequence of SEQ ID NO: 774 has a 15 pair base insert, resulting in a 5 amino acid insert in the corresponding amino acid sequence (SEQ ID NO: 776). This insert is not present in the sequence of SEQ ID NO: 773.

[0978] Further studies on P768P (SEQ ID NO: 315) led to the identification of the putative full-length open reading frame (ORF). The cDNA sequence of the ORF with stop codon is provided in SEQ ID NO: 907. The cDNA sequence of the ORF without stop codon is provided in SEQ ID NO: 908, with the corresponding amino acid sequence being provided in SEQ ID NO: 909. This sequence was found to show 86% identity to a rat calcium transporter protein, indicating that P768P may represent a human calcium transporter protein. The locations of transmembrane domains within P768P were predicted using the PSORT II computer algorithm. Six transmembrane domains were predicted at amino acid positions 118-134, 172-188, 211-227, 230-246, 282-298 and 348-364. The amino acid sequences of SEQ ID NO: 910-915 represent amino acids 1-134, 135-188, 189-227, 228-246, 247-298 and 299-511 of P768P, respectively.

### Example 4

### Synthesis of Polypeptides

[0979] Polypeptides may be synthesized on a Perkin Elmer/Applied Biosystems 430A peptide synthesizer using FMOC chemistry with HPTU (O-Benzotiazole-N,N,N′, N′-tetramethyluronium hexafluorophosphate) activation. A Gly-Cys-Gly sequence may be attached to the amino terminus of the peptide to provide a method of conjugation, binding to an immobilized surface, or labeling of the peptide. Cleavage of the peptides from the solid support may be carried out using the following cleavage mixture: trifluoroacetic acid:ethanedithiol:thioanisole:water:phenol (40:1:2:2:3). After cleaving for 2 hours, the peptides may be precipitated in cold methyl-t-butyl-ether. The peptide pellets may then be dissolved in water containing 0.1% trifluoroacetic acid (TFA) and lyophilized prior to purification by C18 reverse phase HPLC. A gradient of 0%-60% acetonitrile (containing 0.1% TFA) in water (containing 0.1% TFA) may be used to elute the peptides. Following lyophilization of the pure fractions, the peptides may be characterized using electrospray or other types of mass spectrometry and by amino acid analysis.

### Example 5

### Further Isolation and Characterization of Prostate-Specific Polypeptides by PCR-Based Subtraction

[0980] A cDNA library generated from prostate primary tumor mRNA as described above was subtracted with cDNA from normal prostate. The subtraction was performed using a PCR-based protocol (Clontech), which was modified to generate larger fragments. Within this protocol, tester and driver double stranded cDNA were separately digested with five restriction enzymes that recognize six-nucleotide restriction sites (MluI, MscI, PvuII, SalI and StuI). This digestion resulted in an average cDNA size of 600 bp, rather than the average size of 300 bp that results from digestion with RsaI according to the Clontech protocol. This modification did not affect the subtraction efficiency. Two tester populations were then created with different adapters, and the driver library remained without adapters.

[0981] The tester and driver libraries were then hybridized using excess driver cDNA. In the first hybridization step, driver was separately hybridized with each of the two tester cDNA populations. This resulted in populations of (a) unhybridized tester cDNAs, (b) tester cDNAs hybridized to other tester cDNAs, (c) tester cDNAs hybridized to driver cDNAs and (d) unhybridized driver cDNAs. The two separate hybridization reactions were then combined, and rehybridized in the presence of additional denatured driver cDNA. Following this second hybridization, in addition to populations (a) through (d), a fifth population (e) was generated in which tester cDNA with one adapter hybridized to tester cDNA with the second adapter. Accordingly, the second hybridization step resulted in enrichment of differentially expressed sequences which could be used as templates for PCR amplification with adaptor-specific primers.

[0982] The ends were then filled in, and PCR amplification was performed using adaptor-specific primers. Only population (e), which contained tester cDNA that did not hybridize to driver cDNA, was amplified exponentially. A second PCR amplification step was then performed, to reduce background and further enrich differentially expressed sequences.

[0983] This PCR-based subtraction technique normalizes differentially expressed cDNAs so that rare transcripts that are overexpressed in prostate tumor tissue may be recoverable. Such transcripts would be difficult to recover by traditional subtraction methods.

[0984] In addition to genes known to be overexpressed in prostate tumor, seventy-seven further clones were identified. Sequences of these partial cDNAs are provided in SEQ ID NO: 29 to 305. Most of these clones had no significant homology to database sequences. Exceptions were JPTPN23 (SEQ ID NO: 231; similarity to pig valosin-containing protein), JPTPN30 (SEQ ID NO: 234; similarity to rat mRNA for proteasome subunit), JPTPN45 (SEQ ID NO: 243; similarity to rat norvegicus cytosolic NADP-dependent isocitrate dehydrogenase), JPTPN46 (SEQ ID NO: 244; similarity to human subclone H8 4 d4 DNA sequence), JP1D6 (SEQ ID NO: 265; similarity to G. gallus dynein light chain-A), JP8D6 (SEQ ID NO: 288; similarity to human BAC clone RG016J04), JP8F5 (SEQ ID NO: 289; similarity to human subclone H8 3 b5 DNA sequence), and JP8E9 (SEQ ID NO: 299; similarity to human Alu sequence).

[0985] Additional studies using the PCR-based subtraction library consisting of a prostate tumor pool subtracted against a normal prostate pool (referred to as PT-PN PCR subtraction) yielded three additional clones. Comparison of the cDNA sequences of these clones with the most recent release of GenBank revealed no significant homologies to the two clones referred to as P715P and P767P (SEQ ID NO: 312 and 314). The remaining clone was found to show some homology to the known gene KIAA0056 (SEQ ID NO: 318). Using microarray analysis to measure mRNA expression levels in various tissues, all three clones were found to be over-expressed in prostate tumors and BPH tissues. Specifically, clone P715P was over-expressed in most prostate tumors and BPH tissues by a factor of three or greater, with elevated expression seen in the majority of normal prostate samples and in fetal tissue, but negative to low expression in all other normal tissues. Clone P767P was over-expressed in several prostate tumors and BPH tissues, with moderate expression levels in half of the normal prostate samples, and background to low expression in all other normal tissues tested.

[0986] Further analysis, by microarray as described above, of the PT-PN PCR subtraction library and of a DNA subtraction library containing cDNA from prostate tumor subtracted with a pool of normal tissue cDNAs, led to the isolation of 27 additional clones (SEQ ID NO: 340-365 and 381) which were determined to be over-expressed in prostate tumor. The clones of SEQ ID NO: 341, 342, 345, 347, 348, 349, 351, 355-359, 361, 362 and 364 were also found to be expressed in normal prostate. Expression of all 26 clones in a variety of normal tissues was found to be low or undetectable, with the exception of P544S (SEQ ID NO: 356) which was found to be expressed in small intestine. Of the 26 clones, 11 (SEQ ID NO: 340-349 and 362) were found to show some homology to previously identified sequences. No significant homologies were found to the clones of SEQ ID NO: 350, 351, 353-361, and 363-365.

[0987] Comparison of the sequence of SEQ ID NO: 362 with sequences in the GenBank and GeneSeq DNA databases showed that this clone (referred to as P788P) is identical to GeneSeq Accession No. X27262, which encodes a protein found in the GeneSeq protein Accession No. Y00931. The full length cDNA sequence of P788P is shown in SEQ ID NO: 777, with the corresponding amino acid being shown in SEQ ID NO: 778. Subsequently, a full-length cDNA sequence for P788P that contains polymorphisms not found in the sequence of SEQ ID NO: 779, was cloned multiple times by PCR amplification from cDNA prepared from several RNA templates from three individuals. This determined cDNA sequence of this polymorphic variant of P788P is provided in SEQ ID NO: 779, with the corresponding amino acid sequence being provided in SEQ ID NO: 780. The sequence of SEQ ID NO: 780 differs from that of SEQ ID NO: 778 by six amino acid residues. The P788P protein has 7 potential transmembrane domains at the C-terminal portion and is predicted to be a plasma membrane protein with an extracellular N-terminal region.

[0988] Further studies on the clone of SEQ ID NO: 352 (referred to as P790P) led to the isolation of the full-length cDNA sequence of SEQ ID NO: 526. The corresponding amino acid is provided in SEQ ID NO: 527. Data from two quantitative PCR experiments indicated that P790P is over-expressed in 11/15 tested prostate tumor samples and is expressed at low levels in spinal cord, with no expression being seen in all other normal samples tested. Data from further PCR experiments and microarray experiments showed over-expression in normal prostate and prostate tumor with little or no expression in other tissues tested. P790P was subsequently found to show significant homology to a previously identified G-protein coupled prostate tissue receptor.

[0989] Additional studies on the clone of SEQ ID NO: 354 (referred to as P776P) led to the isolation of an extended cDNA sequence, provided in SEQ ID NO: 569. The determined cDNA sequences of three additional splice variants of P776P are provided in SEQ ID NO: 570-572. The amino acid sequences encoded by two predicted open reading frames (ORFs) contained within SEQ ID NO: 570, one predicted ORF contained within SEQ ID NO: 571, and 11 predicted ORFs contained within SEQ ID NO: 569, are provided in SEQ ID NO: 573-586, respectively. Further studies led to the isolation of the full-length sequence for the clone of SEQ ID NO: 570 (provided in SEQ ID NO: 880). Full-length cloning efforts on the clone of SEQ ID NO: 571 led to the isolation of two sequences (provided in SEQ ID NO: 881 and 882), representing a single clone, that are identical with the exception of a polymorphic insertion/deletion at position 1293. Specifically, the clone of SEQ ID NO: 882 (referred to as clone F1) has a C at position 1293. The clone of SEQ ID NO: 881 (referred to as clone F2) has a single base pair deletion at position 1293. The predicted amino acid sequences encoded by 5 open reading frames located within SEQ ID NO: 880 are provided in SEQ ID NO: 883-887, with the predicted amino acid sequences encoded by the clone of SEQ ID NO: 881 and 882 being provided in SEQ ID NO: 888-893.

[0990] Comparison of the cDNA sequences for the clones P767P (SEQ ID NO: 314) and P777P (SEQ ID NO: 350) with sequences in the GenBank human EST database showed that the two clones matched many EST sequences in common, suggesting that P767P and P777P may represent the same gene. A DNA consensus sequence derived from a DNA sequence alignment of P767P, P777P and multiple EST clones is provided in SEQ ID NO: 587. The amino acid sequences encoded by three putative ORFs located within SEQ ID NO: 587 are provided in SEQ ID NO: 588-590.

[0991] The clone of SEQ ID NO: 342 (referred to as P789P) was found to show homology to a previously identified gene. The full length cDNA sequence for P789P and the corresponding amino acid sequence are provided in SEQ ID NO: 878 and 879, respectively.

[0992] Comparison of the sequence of SEQ ID NO: 355 (referred to as P780P) with sequences in the Geneseq DNA database, revealed that P780P shares 100% sequence identity with GeneSEQ accessions Z29049 and Z29050 (SEQ ID NO: 944 and 945, respectively). Z29049 and Z29050 differ from each other in that Z29049 contains a 714 bp deletion relative to Z29050. Thus, Z29049 and Z29050 appear to represent 2 alternative splice forms of the gene P780P. Z29049 encodes a protein that is 379 amino acids in length (GeneSeq Accession number Y15155; SEQ ID NO: 946). Z29050 encodes a protein that is 617 amino acids in length (GeneSeq Accession number Y15156; SEQ ID NO: 947). These two proteins are identical with the exception that Y15155 contains a 238 amino acid deletion relative to Y15156. This amino acid deletion corresponds to the 714 bp deletion in Z29049.

### Example 6

[0993] Peptide Priming of Mice and Propagation of CTL Lines

[0994] 6.1. This Example illustrates the preparation of a cytotoxic T lymphocyte (CTL) cell line specific for cells expressing the P502S gene.

[0995] Mice expressing the transgene for human HLA A2Kb (provided by Dr L. Sherman, The Scripps Research Institute, La Jolla, Calif.) were immunized with P2S#12 peptide (VLGWVAEL; SEQ ID NO: 306), which is derived from the P502S gene (also referred to herein as J1-17, SEQ ID NO: 8), as described by Theobald et al., Proc. Natl. Acad. Sci. USA 92:11993-11997, 1995 with the following modifications. Mice were immunized with 100 μg of P2S#12 and 120 μg of an I-A^{b} binding peptide derived from hepatitis B Virus protein emulsified in incomplete Freund's adjuvant. Three weeks later these mice were sacrificed and single cell suspensions prepared. Cells were then resuspended at 6×10⁶ cells/ml in complete media (RPMI-1640; Gibco BRL, Gaithersburg, Md.) containing 10% FCS, 2 mM Glutamine (Gibco BRL), sodium pyruvate (Gibco BRL), non-essential amino acids (Gibco BRL), 2×10⁵ M 2-mercaptoethanol, 50U/ml penicillin and streptomycin, and cultured in the presence of irradiated (3000 rads) P2S#12-pulsed (5 mg/ml P2S#12 and 10 mg/ml β2-microglobulin) LPS blasts (A2 transgenic spleens cells cultured in the presence of 7 μg/ml dextran sulfate and 25 μg/ml LPS for 3 days). Six days later, cells (5×10⁵/ml) were restimulated with 2.5×10⁶/ml peptide pulsed irradiated (20,000 rads) EL4A2Kb cells (Sherman et al, Science 258:815-818, 1992) and 3×10⁶/ml A2 transgenic spleen feeder cells. Cells were cultured in the presence of 20U/ml IL-2. Cells continued to be restimulated on a weekly basis as described, in preparation for cloning the line.

[0996] P2S#12 line was cloned by limiting dilution analysis with peptide pulsed EL4 A2Kb tumor cells (1×10⁴ cells/ well) as stimulators and A2 transgenic spleen cells as feeders (5×10⁵ cells/ well) grown in the presence of 30U/ml IL-2. On day 14, cells were restimulated as before. On day 21, clones that were growing were isolated and maintained in culture. Several of these clones demonstrated significantly higher reactivity (lysis) against human fibroblasts (HLA A2Kb expressing) transduced with P502S than against control fibroblasts. An example is presented in FIG. 1.

[0997] This data indicates that P2S #12 represents a naturally processed epitope of the P502S protein that is expressed in the context of the human HLA A2Kb molecule.

[0998] 6.2. This Example illustrates the preparation of murine CTL lines and CTL clones specific for cells expressing the P501S gene.

[0999] This series of experiments were performed similarly to that described above. Mice were immunized with the P1S#10 peptide (SEQ ID NO: 337), which is derived from the P501S gene (also referred to herein as L1-12, SEQ ID NO: 110). The P1S#10 peptide was derived by analysis of the predicted polypeptide sequence for P501S for potential HLA-A2 binding sequences as defined by published HLA-A2 binding motifs (Parker, K C, et al, J. Immunol., 152:163, 1994). P1S#10 peptide was synthesized as described in Example 4, and empirically tested for HLA-A2 binding using a T cell based competition assay. Predicted A2 binding peptides were tested for their ability to compete HLA-A2 specific peptide presentation to an HLA-A2 restricted CTL clone (D150M58), which is specific for the HLA-A2 binding influenza matrix peptide fluM58. D150M58 CTL secretes TNF in response to self-presentation of peptide fluM58. In the competition assay, test peptides at 100-200 μg/ml were added to cultures of D150M58 CTL in order to bind HLA-A2 on the CTL. After thirty minutes, CTL cultured with test peptides, or control peptides, were tested for their antigen dose response to the fluM58 peptide in a standard TNF bioassay. As shown in FIG. 3, peptide P1S#10 competes with HLA-A2 restricted presentation of fluM58, demonstrating that peptide P1S#10 binds HLA-A2.

[1000] Mice expressing the transgene for human HLA A2Kb were immunized as described by Theobald et al. (Proc. Natl. Acad. Sci. USA 92:11993-11997, 1995) with the following modifications. Mice were immunized with 62.5 μg of P1S #10 and 120 μg of an I-A^{b} binding peptide derived from Hepatitis B Virus protein emulsified in incomplete Freund's adjuvant. Three weeks later these mice were sacrificed and single cell suspensions prepared using a nylon mesh. Cells were then resuspended at 6×10⁶ cells/ml in complete media (as described above) and cultured in the presence of irradiated (3000 rads) P1S#10-pulsed (2 μg/ml P1S#10 and 10 mg/ml β2-microglobulin) LPS blasts (A2 transgenic spleens cells cultured in the presence of 71 g/ml dextran sulfate and 25 gg/ml LPS for 3 days). Six days later cells (5×10⁵/ml) were restimulated with 2.5×10⁶/ml peptide-pulsed irradiated (20,000 rads) EL4A2Kb cells, as described above, and 3×10⁶/ml A2 transgenic spleen feeder cells. Cells were cultured in the presence of 20 U/ml IL-2. Cells were restimulated on a weekly basis in preparation for cloning. After three rounds of in vitro stimulations, one line was generated that recognized P1S#10-pulsed Jurkat A2Kb targets and P501S-transduced Jurkat targets as shown in FIG. 4.

[1001] A P1S#10-specific CTL line was cloned by limiting dilution analysis with peptide pulsed EL4 A2Kb tumor cells (1×10⁴ cells/well) as stimulators and A2 transgenic spleen cells as feeders (5×10⁵ cells/ well) grown in the presence of 30U/ml IL-2. On day 14, cells were restimulated as before. On day 21, viable clones were isolated and maintained in culture. As shown in FIG. 5, five of these clones demonstrated specific cytolytic reactivity against P501S-transduced Jurkat A2Kb targets. This data indicates that P1S#10 represents a naturally processed epitope of the P501S protein that is expressed in the context of the human HLA-A2.1 molecule.

### Example 7

### Priming of CTL in Vivo Using Naked DNA Immunization with a Prostate Antigen

[1002] The prostate-specific antigen L1-12, as described above, is also referred to as P501S. HLA A2Kb Tg mice (provided by Dr L. Sherman, The Scripps Research Institute, La Jolla, Calif.) were immunized with 100 μg P501S in the vector VR1012 either intramuscularly or intradermally. The mice were immunized three times, with a two week interval between immunizations. Two weeks after the last immunization, immune spleen cells were cultured with Jurkat A2Kb-P501S transduced stimulator cells. CTL lines were stimulated weekly. After two weeks of in vitro stimulation, CTL activity was assessed against P501S transduced targets. Two out of 8 mice developed strong anti-P501S CTL responses. These results demonstrate that P501S contains at least one naturally processed HLA-A2-restricted CTL epitope.

[1003] In subsequent experiments, mice were immunized with either P501S in the vector VR1023 as described above or with a P501S-adenovirus construct at 1×10⁸ pfu/animal. Three weeks later, animals received a boost immunization, with animals that were primed with P501S alone being boosted with either P501S alone or P501S-adenovirus. Spleen cells were harvested at 3 and 6 weeks post-immunization and cultured with irradiated Jurkat A2Kb cells (day 0). CTL activity was assayed on day 6, spleen cells restimulated on day 7, and a secondary CTL assay was performed on day 13. IgG1 and IgG2a responses against the N-terminal region of P501S (amino acids 36-325 of SEQ ID NO: 113) and against a truncated form of P501S (amino acids 342-538 of SEQ ID NO: 113) were assayed using ELISA. The P501S-adenovirus construct effectively elicited both T cell and antibody responses, with P501S alone eliciting CTL responses but not antibody responses. Immunization with P501S alone was found to be most effective in combination with a P501S-adenovirus boost. immunizations with P501S alone generated T cells that respond to peptide 370 (CLSHSVAW). In contrast, immunizations with P501S-adenovirus generated weak or no reactivity to peptide 370. These studies indicate that a combination of a DNA priming immunization followed by an adenovirus boost is a potent approach for eliciting both CTL and antibody response, and that distinct cytotoxic T cells, recognizing different epitopes, may be elicited when immunizing with P501S or P501S plus adenovirus versus immunizing with adenovirus alone.

### Example 8

### Ability of Human T Cells to Recognize Prostate-Specific Polypeptides

[1004] This Example illustrates the ability of T cells specific for a prostate tumor polypeptide to recognize human tumor.

[1005] Human CD8⁺ T cells were primed in vitro to the P2S-12 peptide (SEQ ID NO: 306) derived from P502S (also referred to as J1-17) using dendritic cells according to the protocol of Van Tsai et al. (Critical Reviews in Immunology 18:65-75, 1998). The resulting CD8⁺ T cell microcultures were tested for their ability to recognize the P2S-12 peptide presented by autologous fibroblasts or fibroblasts which were transduced to express the P502S gene in a γ-interferon ELISPOT assay (see Lalvani et al., J. Exp. Med. 186:859-865, 1997). Briefly, titrating numbers of T cells were assayed in duplicate on 10⁴ fibroblasts in the presence of 3 μg/ml human β₂-microglobulin and 1 μg/ml P2S-12 peptide or control E75 peptide. In addition, T cells were simultaneously assayed on autologous fibroblasts transduced with the P502S gene or as a control, fibroblasts transduced with HER-2/neu. Prior to the assay, the fibroblasts were treated with 10 ng/ml γ-interferon for 48 hours to upregulate class I MHC expression. One of the microcultures (#5) demonstrated strong recognition of both peptide pulsed fibroblasts as well as transduced fibroblasts in a γ-interferon ELISPOT assay. FIG. 2A demonstrates that there was a strong increase in the number of γ-interferon spots with increasing numbers of T cells on fibroblasts pulsed with the P2S-12 peptide (solid bars) but not with the control E75 peptide (open bars). This shows the ability of these T cells to specifically recognize the P2S-12 peptide. As shown in FIG. 2B, this microculture also demonstrated an increase in the number of γ-interferon spots with increasing numbers of T cells on fibroblasts transduced to express the P502S gene but not the HER-2/neu gene. These results provide additional confirmatory evidence that the P2S-12 peptide is a naturally processed epitope of the P502S protein. Furthermore, this also demonstrates that there exists in the human T cell repertoire, high affinity T cells which are capable of recognizing this epitope. These T cells should also be capable of recognizing human tumors which express the P502S gene.

### Example 9

### Elicitation of Prostate Antigen-Specific CTL Responses in Human Blood and Identification of CTL Epitopes

[1006] This Example illustrates the ability of a prostate-specific antigen to elicit a cytotoxic T lymphocyte (CTL) response in blood of normal humans.

[1007] Autologous dendritic cells (DC) were differentiated from monocyte cultures derived from PBMC of normal donors by growth for five days in RPMI medium containing 10% human serum, 50 ng/ml GMCSF and 30 ng/ml IL-4. Following culture, DC were infected overnight with recombinant P501S-expressing vaccinia virus at an M.O.I. of 5 and matured for 8 hours by the addition of 2 micrograms/ml CD40 ligand. Virus was inactivated by UV irradiation, CD8⁺ cells were isolated by positive selection using magnetic beads, and priming cultures were initiated in 24-well plates. Following five stimulation cycles using autologous fibroblasts retrovirally transduced to express P501S and CD80, CD8+ lines were identified that specifically produced interferon-gamma when stimulated with autologous P501S-transduced fibroblasts. The P501S-specific activity of cell line 3A-1 could be maintained following additional stimulation cycles on autologous B-LCL transduced with P501S. Line 3A-1 was shown to specifically recognize autologous B-LCL transduced to express P501S, but not EGFP-transduced autologous B-LCL, as measured by cytotoxicity assays (⁵¹Cr release) and interferon-gamma production (Interferon-gamma Elispot; see above and Lalvani et al., J. Exp. Med. 186:859-865, 1997). The results of these assays are presented in FIGS. 6A and 6B.

[1008] The ability of the prostate antigen P501S to elicit an immune response in human males was examined as follows.

[1009] Dendritic Cells (DC) were isolated by Percol gradient followed by differential adherence, and cultured for 5 days in the presence of RPMI medium containing 1% human serum, 50 ng/ml GM-CSF and 30 ng/ml IL-4. Following culture, DC were infected for 24 hours with P501S-expressing Adenovirus at an MOI of 10 and matured for an additional 24 hours by the addition of 2 ug/ml CD40 ligand. CD8 cells were enriched from PBMC of a normal male donor by the subtraction of CD4+, CD14+ and CD16+ populations from PBMC with magnetic beads. Priming cultures containing 10,000 P501S-expressing DC and 100,000 CD8+ T cells per well were set up in 96-well V-bottom plates in RPMI containing 10% human serum, 5 ng/ml IL-12 and 10 ng/ml IL-6. Cultures were stimulated every 7 days using autologous fibroblasts retrovirally transduced to express P501S and CD80, and were treated with IFN-gamma for 48-72 hours to upregulate MHC Class I expression. Ten u/ml IL-2 was added at the time of stimulation and on days 2 and 5 following stimulation. Following 4 stimulation cycles, multiple P501S-specific CD8+ T cell lines were identified that produced IFN-gamma in response to IFN-gamma treated P501S/CD80-expressing autologous fibroblasts, but not in response to IFN-gamma treated P703P/CD80-expressing autologous fibroblasts in a γ-IFN Elispot assay. The three most promising lines, referred to as 1H1, 2H2 and 6F1, were cloned in 96-well plates with 0.5 cell/well or 2 cells/well in the presence of 75,000 PBMC/well, 10,000 B-LCL/well, 30 ng/ml OKT3 and 50 u/ml IL-2 to isolate P501S-specific clones.

[1010] To identify the class I restriction element for the P501S-specific clones, HLA blocking and mismatch analyses were performed as follows. In γ-IFN Elispot assays, the specific response of clones to P501S transduced autologous fibroblasts was blocked by pre-incubation with 25 ug/ml W6/32 (pan-Class I blocking antibody) and for 6F1 with BB7.2 (HLA-A2 blocking antibody), and for 1H1 and 2H2 with B1.23.2 (HLA-B/C blocking antibody). The results demonstrated that the P501S specific response of the clones is restricted to an HLA-A2 and/or HLA-B or-C allele. For the HLA mismatch analysis, autologous fibroblasts (D310, HLA-A2,A3,B44,B51,Cw5,Cw14) and heterologous fibroblasts (D326, HLA-A1, A2,B8,B51,Cw1,Cw7) that share the HLA-A-2 and HLAB51 allele were transduced with P501S and used to stimulate the clones. In γ-IFN Elispot assays, 1H1 and 2H2 only recognized the autologous fibroblasts, suggesting (together with the antibody blocking assays above) that the relevant allele was B44, Cw5, or Cw14, and 6F1 recognized both D310 and D326, suggesting the response was restricted to HLA-A0201.

[1011] To confirm and extend the above restriction data, each of the alleles from D310 was cloned into the pBIB expresion vector and cotransfected into Cos-7 cells together with full-length P501S. 1H1 and 2H2 clones specifically recognized Cos-7 cells cotransfected with P501S and the Cw0501 allele, while 6F1 clones recognized Cos-7 cells cotransfected with P501S and the HLA-A0201 allele. These results demonstrate that the above alleles are responsible for presenting P501S epitopes to the above CTL.

[1012] To identify a sub-fragment of P501S that contained the epitope recognized by the CTL, 3′ truncations of P501S were cotransfected with the above alleles into Cos-7 cells. A 6F1 clone was found to recognize an epitope derived from the initial 354 nucleotides of the P501S open reading frame (ORF), a 2H2 clone (referred to as 2H2-1A12) recognized an epitope derived from the sequence of P501S found between amino acids 471-553 of P501S (SEQ ID NO: 113), and a 1H1 clone (referred to as 1H1-1A6) recognized an epitope derived from the sequence of P501S found between amino acids 278-353 of P501S (SEQ ID NO: 113).

[1013] To identify minimal epitopes recognized by these CTL, 15 or 19-mer peptides overlapping by 11 or 15 amino acids, respectively, were synthesized, pulsed onto autologous B-LCL and used as antigen presenting cells for the CTL in γ-IFN ELISPOT assays. For 1H1-1A6, a pool of four 15-21 mers that spanned amino acids 246-325 of SEQ ID NO: 113 was specifically recognized by the CTL. In the pool breakdown, peptide 291 (amino acids 291-310; SEQ ID NO: 983, cDNA sequence provided in SEQ ID NO: 972) was specifically recognized by the 1H1-1A6 CTL. Ten-mer peptides from amino acids 291-310 of P501S were then synthesized and tested as above. Peptides 291, 292, and 293 (SEQ ID NO: 984, 982 and 980, respectively; cDNA sequences provided in SEQ ID NO: 975, 976 and 973, respectively) were all specifically recognized by the CTL. These results demonstrate that each of the three 10-mer peptides contain the minimal epitope recognized by the CTL. The 8-mer peptide common to the three 10-mers with the sequence TDFVGEGL (SEQ ID NO: 981; cDNA sequence provided in SEQ ID NO: 981) was then synthesized and tested. The 8-mer was also recognized efficiently by the CTL, demonstrating that the minimal naturally processed peptide epitope recognized by the CTL spans SEQ ID NO: 981.

[1014] For 2H2-1A12, a pool of twenty 15-mers that spanned amino acids 462-553 was pulsed onto autologous B-LCL and tested as above. Peptides 462 and 465 (SEQ ID NO: 979 and 977, respectively; cDNA sequences provided in SEQ ID NO: 971 and 969, respectively) were both specifically recognized by the CTL. These results demonstrate that each of the two 15-mer peptides contain the minimal epitope recognized by the CTL. 10-mer peptides overlapping by a single amino acid were then synthesized from the sequence in common to the two above peptides and tested as above. Primarily peptide 464 (amino acids 464-474; SEQ ID NO: 978; cDNA sequence provided in SEQ ID NO: 970) and also peptides 463 (amino acids 463-472) and 465 (amino acids 465-475) were specifically recognized by the CTL. These results indicate that the sequence of SEQ ID NO: 978 (amino acids 464-474 of P501S) contains the minimal epitope recognized by 2H2-1A12 CTL. The recognition of peptides 463 and 465 either reflects contamination of these peptides with peptide 464, or additional secondary and inefficient recognition of these peptides by the CTL.

### Example 10

### Identification of a Naturally Processed CTL Epitope Contained Within the Prostate-Specific Antigen P703P

[1015] The 9-mer peptide p5 (SEQ ID NO: 338) was derived from the P703P antigen (also referred to as P20). The p5 peptide is immunogenic in human HLA-A2 donors and is a naturally processed epitope. Antigen specific human CD8+ T cells can be primed following repeated in vitro stimulations with monocytes pulsed with p5 peptide. These CTL specifically recognize p5-pulsed and P703P-transduced target cells in both ELISPOT (as described above) and chromium release assays. Additionally, immunization of HLA-A2Kb transgenic mice with p5 leads to the generation of CTL lines which recognize a variety of HLA-A2Kb or HLA-A2 transduced target cells expressing P703P.

[1016] Initial studies demonstrating that p5 is a naturally processed epitope were done using HLA-A2Kb transgenic mice. HLA-A2Kb transgenic mice were immunized subcutaneously in the footpad with 100 μg of p5 peptide together with 140 μg of hepatitis B virus core peptide (a Th peptide) in Freund's incomplete adjuvant. Three weeks post immunization, spleen cells from immunized mice were stimulated in vitro with peptide-pulsed LPS blasts. CTL activity was assessed by chromium release assay five days after primary in vitro stimulation. Retrovirally transduced cells expressing the control antigen P703P and HLA-A2Kb were used as targets. CTL lines that specifically recognized both p5-pulsed targets as well as P703P-expressing targets were identified.

[1017] Human in vitro priming experiments demonstrated that the p5 peptide is immunogenic in humans. Dendritic cells (DC) were differentiated from monocyte cultures derived from PBMC of normal human donors by culturing for five days in RPMI medium containing 10% human serum, 50 ng/ml human GM-CSF and 30 ng/ml human IL-4. Following culture, the DC were pulsed with 1 ug/ml p5 peptide and cultured with CD8+ T cell enriched PBMC. CTL lines were restimulated on a weekly basis with p5-pulsed monocytes. Five to six weeks after initiation of the CTL cultures, CTL recognition of p5-pulsed target cells was demonstrated. CTL were additionally shown to recognize human cells transduced to express P703P, demonstrating that p5 is a naturally processed epitope.

[1018] Studies identifying a further peptide epitope (referred to as peptide 4) derived from the prostate tumor-specific antigen P703P that is capable of being recognized by CD4 T cells on the surface of cells in the context of HLA class II molecules were carried out as follows. The amino acid sequence for peptide 4 is provided in SEQ ID NO: 781, with the corresponding cDNA sequence being provided in SEQ ID NO: 782.

[1019] Twenty 15-mer peptides overlapping by 10 amino acids and derived from the carboxy-terminal fragment of P703P were generated using standard procedures. Dendritic cells (DC) were derived from PBMC of a normal female donor using GM-CSF and IL-4 by standard protocols. CD4 T cells were generated from the same donor as the DC using MACS beads and negative selection. DC were pulsed overnight with pools of the 15-mer peptides, with each peptide at a final concentration of 0.25 microgram/ml. Pulsed DC were washed and plated at 1×10⁴ cells/well of 96-well V-bottom plates and purified CD4 T cells were added at 1×10⁵/well. Cultures were supplemented with 60 ng/ml IL-6 and 10 ng/ml IL-12 and incubated at 37° C. Cultures were restimulated as above on a weekly basis using DC generated and pulsed as above as antigen presenting cells, supplemented with 5 ng/ml IL-7 and 10 u/ml IL-2. Following 4 in vitro stimulation cycles, 96 lines (each line corresponding to one well) were tested for specific proliferation and cytokine production in response to the stimulating pools with an irrelevant pool of peptides derived from mammaglobin being used as a control.

[1020] One line (referred to as 1-F9) was identified from pool #1 that demonstrated specific proliferation (measured by 3H proliferation assays) and cytokine production (measured by interferon-gamma ELISA assays) in response to pool #1 of P703P peptides. This line was further tested for specific recognition of the peptide pool, specific recognition of individual peptides in the pool, and in HLA mismatch analyses to identify the relevant restricting allele. Line 1-F9 was found to specifically proliferate and produce interferon-gamma in response to peptide pool #1, and also to peptide 4 (SEQ ID NO: 781). Peptide 4 corresponds to amino acids 126-140 of SEQ ID NO: 327. Peptide titration experiments were conducted to assess the sensitivity of line 1-F9 for the specific peptide. The line was found to specifically respond to peptide 4 at concentrations as low as 0.25 ng/ml, indicating that the T cells are very sensitive and therefore likely to have high affinity for the epitope.

[1021] To determine the HLA restriction of the P703P response, a panel of antigen presenting cells (APC) was generated that was partially matched with the donor used to generate the T cells. The APC were pulsed with the peptide and used in proliferation and cytokine assays together with line 1-F9. APC matched with the donor at HLA-DRB0701 and HLA-DQB02 alleles were able to present the peptide to the T cells, indicating that the P703P-specific response is restricted to one of these alleles.

[1022] Antibody blocking assays were utilized to determine if the restricting allele was HLA-DR0701 or HLA-DQ02. The anti-HLA-DR blocking antibody L243 or an irrelevant isotype matched IgG2a were added to T cells and APC cultures pulsed with the peptide RMPTVLQCVNVSVVS (SEQ ID NO: 781) at 250 ng/ml. Standard interferon-gamma and proliferation assays were performed. Whereas the control antibody had no effect on the ability of the T cells to recognize peptide-pulsed APC, in both assays the anti-HLA-DR antibody completely blocked the ability of the T cells to specifically recognize peptide-pulsed APC.

[1023] To determine if the peptide epitope RMPTVLQCVNVSVVS (SEQ ID NO: 781) was naturally processed, the ability of line 1-F9 to recognize APC pulsed with recombinant P703P protein was examined. For these experiments a number of recombinant P703P sources were utilized; E. coli-derived P703P, Pichia-derived P703P and baculovirus-derived P703P. Irrelevant protein controls used were E. coli-derived L3E a lung-specific antigen) and baculovirus-derived mammaglobin. In interferon-gamma ELISA assays, line 1-F9 was able to efficiently recognize both E. coli forms of P703P as well as Pichia-derived recombinant P703P, while baculovirus-derived P703P was recognized less efficiently. Subsequent Western blot analysis revealed that the E coli and Pichia P703P protein preparations were intact while the baculovirus P703P preparation was approximately 75% degraded. Thus, peptide RMPTVLQCVNVSVVS (SEQ ID NO: 781) from P703P is a naturally processed peptide epitope derived from P703P and presented to T cells in the context of HLA-DRB-0701

[1024] In further studies, twenty-four 15-mer peptides overlapping by 10 amino acids and derived from the N-terminal fragment of P703P (corresponding to amino acids 27-154 of SEQ ID NO: 525) were generated by standard procedures and their ability to be recognized by CD4 cells was determined essentially as described above. DC were pulsed overnight with pools of the peptides with each peptide at a final concentration of 10 microgram/ml. A large number of individual CD4 T cell lines (65/480) demonstrated significant proliferation and cytokine release (IFN-gamma) in response to the P703P peptide pools but not to a control peptide pool. The CD4 T cell lines which demonstrated specific activity were restimulated on the appropriate pool of P703P peptides and reassayed on the individual peptides of each pool as well as a peptide dose titration of the pool of peptides in a IFN-gamma release assay and in a proliferation assay.

[1025] Sixteen immunogenic peptides were recognized by the T cells from the entire set of peptide antigens tested. The amino acid sequences of these peptides are provided in SEQ ID NO: 799-814, with the corresponding cDNA sequences being provided in SEQ ID NO: 783-798, respectively. In some cases the peptide reactivity of the T cell line could be mapped to a single peptide, however some could be mapped to more than one peptide in each pool. Those CD4 T cell lines that displayed a representative pattern of recognition from each peptide pool with a reasonable affinity for peptide were chosen for further analysis (I-1A, -6A; II-4C, -5E; III-6E, IV-4B, -3F, -9B, -10F, V-5B, -4D, and -10F). These CD4 T cells lines were restimulated on the appropriate individual peptide and reassayed on autologous DC pulsed with a truncated form of recombinant P703P protein made in E. coli (a.a. 96-254 of SEQ ID NO: 525), full-length P703P made in the baculovirus expression system, and a fusion between influenza virus NS1 and P703P made in E. coli. Of the T cell lines tested, line I-1A recognized specifically the truncated form of P703P (E. coli) but no other recombinant form of P703P. This line also recognized the peptide used to elicit the T cells. Line 2-4C recognized the truncated form of P703P (E. coli) and the full length form of P703P made in baculovirus, as well as peptide. The remaining T cell lines tested were either peptide-specific only (II-5E, II-6F, IV-4B, IV-3F, IV-9B, IV-10F, V-5B and V-4D) or were non-responsive to any antigen tested (V-10F). These results demonstrate that the peptide sequence RPLLANDLMLIKLDE (SEQ ID NO: 814; corresponding to a.a. 110-124 of SEQ ID NO: 525) recognized by the T cell line I-1A, and the peptide sequences SVSESDTIRSISIAS (SEQ ID NO: 811; corresponding to a.a. 125-139 of SEQ ID NO: 525) and ISIASQCPTAGNSCL (SEQ ID NO: 810; corresponding to a.a. 135-149 of SEQ ID NO: 525) recognized by the T cell line II-4C may be naturally processed epitopes of the P703P protein.

[1026] In further studies, forty 15-mer peptides overlapping by 10 amino acids and derived spanning amino acids 47 to 254 of P703P (SEQ ID NO: 525) were generated by standard procedures and their ability to be recognized by CD4 cells was determined essentially as described above. DC were prepared from PBMC of a donor having distinct HLA DR and DQ alleles from that used in previous experiments. DC were pulsed overnight with pools of the peptides with each peptide at a final concentration of 0.25 microgram/ml, and each pool containing 10 peptides. Twelve lines were identified that demonstrated specific proliferation and cytokine production (measured in gamma-interferon ELISA assays) in response to the stimulating peptide pool. These lines were further tested for specific recognition of the peptide pool, specific recognition of individual peptides in the pool, and specific recognition of recombinant P703P protein. Lines 3A5H and 3A9H specifically proliferated and produced gamma-interferon in response to recombinant protein and one individual peptide as well as the peptide pool. Following re-stimulation on targets loaded with the specific peptide, only 3A9H responded specifically to targets exposed to lysates of fibroblasts infected adenovirus expressing full-length P703P. These results indicates that the line 3A9H can respond to antigenic peptide derived from protein synthesized in mammalian cells. The peptide to which the specific CD4 line responded correspond to amino acids 155-170 of P703P (SEQ ID NO: 943). The DNA sequence for this peptide is provided in SEQ ID NO: 942.

### Example 11

### Expression of a Breast Tumor-Derived Antigen in Prostate

[1027] Isolation of the antigen B305D from breast tumor by differential display is described in U.S. patent application Ser. No. 08/700,014, filed Aug. 20, 1996. Several different splice forms of this antigen were isolated. The determined cDNA sequences for these splice forms are provided in SEQ ID NO: 366-375, with the amino acid sequences corresponding to the sequences of SEQ ID NO: 292, 298 and 301-303 being provided in SEQ ID NO: 299-306, respectively. In further studies, a splice variant of the cDNA sequence of SEQ ID NO: 366 was isolated which was found to contain an additional guanine residue at position 884 (SEQ ID NO: 530), leading to a frameshift in the open reading frame. The determined DNA sequence of this ORF is provided in SEQ ID NO: 531. This frameshift generates a protein sequence (provided in SEQ ID NO: 532) of 293 amino acids that contains the C-terminal domain common to the other isoforms of B305D but that differs in the N-terminal region.

[1028] The expression levels of B305D in a variety of tumor and normal tissues were examined by real time PCR and by Northern analysis. The results indicated that B305D is highly expressed in breast tumor, prostate tumor, normal prostate and normal testes, with expression being low or undetectable in all other tissues examined (colon tumor, lung tumor, ovary tumor, and normal bone marrow, colon, kidney, liver, lung, ovary, skin, small intestine, stomach). Using real-time PCR on a panel of prostate tumors, expression of B305D in prostate tumors was shown to increase with increasing Gleason grade, demonstrating that expression of B305D increases as prostate cancer progresses.

### Example 12

### Generation of Human CTL in Vitro Using Whole Gene Priming and Stimulation Techniques with the Prostate-Specific Antigen P501S

[1029] Using in vitro whole-gene priming with P501S-vaccinia infected DC (see, for example, Yee et al, The Journal of Immunology, 157(9):4079-86, 1996), human CTL lines were derived that specifically recognize autologous fibroblasts transduced with P501S (also known as L1-12), as determined by interferon-γ ELISPOT analysis as described above. Using a panel of HLA-mismatched B-LCL lines transduced with P501S, these CTL lines were shown to be likely restricted to HLAB class I allele. Specifically, dendritic cells (DC) were differentiated from monocyte cultures derived from PBMC of normal human donors by growing for five days in RPMI medium containing 10% human serum, 50 ng/ml human GM-CSF and 30 ng/ml human IL-4. Following culture, DC were infected overnight with recombinant P501S vaccinia virus at a multiplicity of infection (M.O.I) of five, and matured overnight by the addition of 3 μg/ml CD40 ligand. Virus was inactivated by UV irradiation. CD8+ T cells were isolated using a magnetic bead system, and priming cultures were initiated using standard culture techniques. Cultures were restimulated every 7-10 days using autologous primary fibroblasts retrovirally transduced with P501S and CD80. Following four stimulation cycles, CD8+ T cell lines were identified that specifically produced interferon-γ when stimulated with P501S and CD80-transduced autologous fibroblasts. A panel of HLA-mismatched B-LCL lines transduced with P501S were generated to define the restriction allele of the response. By measuring interferon-γ in an ELISPOT assay, the P501S specific response was shown to be likely restricted by HLA B alleles. These results demonstrate that a CD8+ CTL response to P501S can be elicited.

[1030] To identify the epitope(s) recognized, cDNA encoding P501S was fragmented by various restriction digests, and sub-cloned into the retroviral expression vector pBIB-KS. Retroviral supernatants were generated by transfection of the helper packaging line Phoenix-Ampho. Supernatants were then used to transduce Jurkat/A2Kb cells for CTL screening. CTL were screened in IFN-gamma ELISPOT assays against these A2Kb targets transduced with the “library” of P501S fragments. Initial positive fragments P501S/H3 and P501S/F2 were sequenced and found to encode amino acids 106-553 and amino acids 136-547, respectively, of SEQ ID NO: 113. A truncation of H3 was made to encode amino acid residues 106-351 of SEQ ID NO: 113, which was unable to stimulate the CTL, thus localizing the epitope to amino acid residues 351-547. Additional fragments encoding amino acids 1-472 (Fragment A) and amino acids 1-351 (Fragment B) were also constructed. Fragment A but not Fragment B stimulated the CTL thus localizing the epitope to amino acid residues 351-472. Overlapping 20-mer and 18-mer peptides representing this region were tested by pulsing Jurkat/A2Kb cells versus CTL in an IFN-gamma assay. Only peptides P501S-369(20) and P501S-369(18) stimulated the CTL. Nine-mer and 10-mer peptides representing this region were synthesized and similarly tested. Peptide P501S-370 (SEQ ID NO: 539) was the minimal 9-mer giving a strong response. Peptide P501S-376 (SEQ ID NO: 540) also gave a weak response, suggesting that it might represent a cross-reactive epitope.

[1031] In subsequent studies, the ability of primary human B cells transduced with P501S to prime MHC class I-restricted, P501S-specific, autologous CD8 T cells was examined. Primary B cells were derived from PBMC of a homozygous HLA-A2 donor by culture in CD40 ligand and IL-4, transduced at high frequency with recombinant P501S in the vector pBIB, and selected with blastocidin-S. For in vitro priming, purified CD8+ T cells were cultured with autologous CD40 ligand+IL-4 derived, P501S-transduced B cells in a 96-well microculture format. These CTL microcultures were re-stimulated with P501S-transduced B cells and then assayed for specificity. Following this initial screen, microcultures with significant signal above background were cloned on autologous EBV-transformed B cells (BLCL), also transduced with P501S. Using IFN-gamma ELISPOT for detection, several of these CD8 T cell clones were found to be specific for P501S, as demonstrated by reactivity to BLCL/P501S but not BLCL transduced with control antigen. It was further demonstrated that the anti-P501S CD8 T cell specificity is HLA-A2-restricted. First, antibody blocking experiments with anti-HLA-A,B,C monoclonal antibody (W6.32), anti-HLA-B,C monoclonal antibody (B1.23.2) and a control monoclonal antibody showed that only the anti-HLA-A,B,C antibody blocked recognition of P501S-expressing autologous BLCL. Secondly, the anti-P501S CTL also recognized an HLA-A2 matched, heterologous BLCL transduced with P501S, but not the corresponding EGFP transduced control BLCL.

[1032] A naturally processed, CD8, class I-restricted peptide epitope of P501S was identified as follows. Dendritic cells (DC) were isolated by Percol gradient followed by differential adherence, and cultured for 5 days in the presence of RPMI medium containing 1% human serum, 50 ng/ml GM-CSF and 30 ng/ml IL-4. Following culture, DC were infected for 24 hours with P501S-expressing adenovirus at an MOI of 10 and matured for an additional 24 hours by the addition of 2 ug/ml CD40 ligand. CD8 cells were enriched for by the subtraction of CD4+, CD14+ and CD16+ populations from PBMC with magnetic beads. Priming cultures containing 10,000 P501S-expressing DC and 100,000 CD8+ T cells per well were set up in 96-well V-bottom plates with RPMI containing 10% human serum, 5 ng/ml IL-12 and 10 ng/ml IL-6. Cultures were stimulated every 7 days using autologous fibroblasts retrovirally transduced to express P501S and CD80, and were treated with IFN-gamma for 48-72 hours to upregulate MHC Class I expression. 10 u/ml IL-2 was added at the time of stimulation and on days 2 and 5 following stimulation. Following 4 stimulation cycles, one P501S-specific CD8+ T cell line (referred to as 2A2) was identified that produced IFN-gamma in response to IFN-gamma-treated P501S/CD80 expressing autologous fibroblasts, but not in response to IFN-gamma-treated P703P/CD80 expressing autologous fibroblasts in a γ-IFN Elispot assay. Line 2A2 was cloned in 96-well plates with 0.5 cell/well or 2 cells/well in the presence of 75,000 PBMC/well, 10,000 B-LCL/well, 30 ng/ml OKT3 and 50 u/ml IL-2. Twelve clones were isolated that showed strong P501S specificity in response to transduced fibroblasts.

[1033] Fluorescence activated cell sorting (FACS) analysis was performed on P501S-specific clones using CD3−, CD4− and CD8-specific antibodies conjugated to PercP, FITC and PE respectively. Consistent with the use of CD8 enriched T cells in the priming cultures, P5401 S-specific clones were determined to be CD3+, CD8+ and CD4−.

[1034] To identify the relevant P501S epitope recognized by P501S specific CTL, pools of 18-20 mer or 30-mer peptides that spanned the majority of the amino acid sequence of P501S were loaded onto autologous B-LCL and tested in γ-IFN Elispot assays for the ability to stimulate two P501S-specific CTL clones, referred to as 4E5 and 4E7. One pool, composed of five 18-20 mer peptides that spanned amino acids 411-486 of P501S (SEQ ID NO: 113), was found to be recognized by both P501S-specific clones. To identify the specific 18-20 mer peptide recognized by the clones, each of the 18-20 mer peptides that comprised the positive pool were tested individually in γ-IFN Elispot assays for the ability to stimulate the two P501S-specific CTL clones, 4E5 and 4E7. Both 4E5 and 4E7 specifically recognized one 20-mer peptide (SEQ ID NO: 853; cDNA sequence provided in SEQ ID NO: 854) that spanned amino acids 453-472 of P501S. Since the minimal epitope recognized by CD8+ T cells is almost always either a 9 or 10-mer peptide sequence, 10-mer peptides that spanned the entire sequence of SEQ ID NO: 853 were synthesized that differed by 1 amino acid. Each of these 10-mer peptides was tested for the ability to stimulate two P501S-specific clones, (referred to as 1D5 and 1E12). One 10-mer peptide (SEQ ID NO: 855; cDNA sequence provided in SEQ ID NO: 856) was identified that specifically stimulated the P501S-specific clones. This epitope spans amino acids 463-472 of P501S. This sequence defines a minimal 10-mer epitope from P501S that can be naturally processed and to which CTL responses can be identified in normal PBMC. Thus, this epitope is a candidate for use as a vaccine moiety, and as a therapeutic and/or diagnostic reagent for prostate cancer.

[1035] To identify the class I restriction element for the P501S-derived sequence of SEQ ID NO: 855, HLA blocking and mismatch analyses were performed. In γ-IFN Elispot assays, the specific response of clones 4A7 and 4E5 to P501S-transduced autologous fibroblasts was blocked by pre-incubation with 25 ug/ml W6/32 (pan-Class I blocking antibody) and B1.23.2 (HLA-B/C blocking antibody). These results demonstrate that the SEQ ID NO: 855-specific response is restricted to an HLA-B or HLA-C allele.

[1036] For the HLA mismatch analysis, autologous B-LCL (HLA-A1,A2,B8,B51, Cw1, Cw7) and heterologous B-LCL (HLA-A2,A3,B18,B51,Cw5,Cw14) that share the HLAB51 allele were pulsed for one hour with 20 ug/ml of peptide of SEQ ID NO: 855, washed, and tested in γ-IFN Elispot assays for the ability to stimulate clones 4A7 and 4E5. Antibody blocking assays with the B1.23.2 (HLA-B/C blocking antibody) were also performed. SEQ ID NO: 855-specific response was detected using both the autologous (D326) and heterologous (D107) B-LCL, and furthermore the responses were blocked by pre-incubation with 25 ug/ml of B1.23.2 HLA-B/C blocking antibody. Together these results demonstrate that the P501S-specific response to the peptide of SEQ ID NO: 855 is restricted to the HLA-B51 class I allele. Molecular cloning and sequence analysis of the HLA-B51 allele from D3326 revealed that the HLA-B51 subtype of D326 is HLA-B51011.

[1037] Based on the 10-mer P501S-derived epitope of SEQ ID NO: 855, two 9-mers with the sequences of SEQ ID NO: 857 and 858 were synthesized and tested in Elispot assays for the ability to stimulate two P501S-specific CTL clones derived from line 2A2. The 10-mer peptide of SEQ ID NO: 855, as well as the 9-mer peptide of SEQ ID NO: 858, but not the 9-mer peptide of SEQ ID NO: 857, were capable of stimulating the P501S-specific CTL to produce IFN-gamma. These results demonstrate that the peptide of SEQ ID NO: 858 is a 9-mer P501S-derived epitope recognized by P501S-specific CTL. The DNA sequence encoding the epitope of SEQ ID NO: 858 is provided in SEQ ID NO: 859.

[1038] To identify the class I restricting allele for the P501S-derived peptide of SEQ ID NO: 855 and 858 specific response, each of the HLA B and C alleles were cloned from the donor used in the in vitro priming experiment. Sequence analysis indicated that the relevant alleles were HLA-B8, HLA-B51, HLA-Cw01 and HLA-Cw07. Each of these alleles were subcloned into an expression vector and co-transfected together with the P501S gene into VA-13 cells. Transfected VA-13 cells were then tested for the ability to specifically stimulate the P501S-specific CTL in ELISPOT assays. VA-13 cells transfected with P501S and HLA-B51 were capable of stimulating the P501S-specific CTL to secrete gamma-IFN. VA-13 cells transfected with HLA-B51 alone or P501S+ the other HLA-alleles were not capable of stimulating the P501S-specific CTL. These results demonstrate that the restricting allele for the P501S-specific response is the HLAB51 allele. Sequence analysis revealed that the subtype of the relevant restricting allele is HLA-B51011.

[1039] To determine if the P501S-specific CTL could recognize prostate tumor cells that express P501S, the P501S-positive lines LnCAP and CRL2422 (both expressing “moderate” amounts of P501S mRNA and protein), and PC-3 (expressing low amounts of P501S mRNA and protein), plus the P501S-negative cell line DU-145 were retrovirally transduced with the HLA-B51011 allele that was cloned from the donor used to generate the P501S-specific CTL. HLA-B51011- or EGFP-transduced and selected tumor cells were treated with gamma-interferon and androgen (to upregulate stimulatory functions and P501S, respectively) and used in gamma-interferon Elispot assays with the P501S-specific CTL clones 4E5 and 4E7. Untreated cells were used as a control.

[1040] Both 4E5 and 4E7 efficiently and specifically recognized LnCAP and CRL2422 cells that were transduced with the HLA-B51011 allele, but not the same cell lines transduced with EGFP. Additionally, both CTL clones specifically recognized PC-3 cells transduced with HLA-B51011, but not the P501S-negative tumor cell line DU-145. Treatment with gamma-interferon or androgen did not enhance the ability of CTL to recognize tumor cells. These results demonstrate that P501S-specific CTL, generated by in vitro whole gene priming, specifically and efficiently recognize prostate tumor cell lines that express P501S.

[1041] A naturally processed CD4 epitope of P501S was identified as follows.

[1042] CD4 cells specific for P501S were prepared as described above. A series of 16 overlapping peptides were synthesized that spanned approximately 50% of the amino terminal portion of the P501S gene (amino acids 1-325 of SEQ ID NO: 113). For priming, peptides were combined into pools of 4 peptides, pulsed at 4 μg/ml onto dendritic cells (DC) for 24 hours, with TNF-alpha. DC were then washed and mixed with negatively selected CD4+ T cells in 96 well U-bottom plates. Cultures were re-stimulated weekly on fresh DC loaded with peptide pools. Following a total of 4 stimulation cycles, cells were rested for an additional week and tested for specificity to APC pulsed with peptide pools using γ-IFN ELISA and proliferation assays. For these assays, adherent monocytes loaded with either the relevant peptide pool at 4 ug/ml or an irrelevant peptide at μg/ml were used as APC. T cell lines that demonstrated either specific cytokine secretion or proliferation were then tested for recognition of individual peptides that were present in the pool. T cell lines could be identified from pools A and B that recognized individual peptides from these pools.

[1043] From pool A, lines AD9 and AE10 specifically recognized peptide 1 (SEQ ID NO: 862), and line AF5 recognized peptide 39 (SEQ ID NO: 861). From pool B, line BC6 could be identified that recognized peptide 58 (SEQ ID NO: 860). Each of these lines were stimulated on the specific peptide and tested for specific recognition of the peptide in a titration assay as well as cell lysates generated by infection of HEK 293 cells with adenovirus expressing either P501S or an irrelevant antigen. For these assays, APC-adherent monocytes were pulsed with either 10, 1, or 0.1 μg/ml individual P501S peptides, and DC were pulsed overnight with a 1:5 dilution of adenovirally infected cell lysates. Lines AD9, AE10 and AF5 retained significant recognition of the relevant P501S-derived peptides even at 0.1 mg/ml. Furthermore, line AD9 demonstrated significant (8.1 fold stimulation index) specific activity for lysates from adenovirus-P501S infected cells. These results demonstrate that high affinity CD4 T cell lines can be generated toward P501S-derived epitopes, and that at least a subset of these T cells specific for the P501S derived sequence of SEQ ID NO: 862 are specific for an epitope that is naturally processed by human cells. The DNA sequences encoding the amino acid sequences of SEQ ID NO: 860-862 are provided in SEQ ID NO: 863-865, respectively.

[1044] To further characterize the P501S-specific activity of AD9, the line was cloned using anti-CD3. Three clones, referred to as 1A1, 1A9 and 1F5, were identified that were specific for the P501S-1 peptide (SEQ ID NO: 862). To determine the HLA restriction allele for the P501S-specific response, each of these clones was tested in class II antibody blocking and HLA mismatch assays using proliferation and gamma-interferon assays. In antibody blocking assays and measuring gamma-interferon production using ELISA assays, the ability of all three clones to recognize peptide pulsed APC was specifically blocked by co-incubation with either a pan-class II blocking antibody or a HLA-DR blocking antibody, but not with a HLA-DQ or an irrelevant antibody. Proliferation assays performed simultaneously with the same cells confirmed these results. These data indicate that the P501S-specific response of the clones is restricted by an HLA-DR allele. Further studies demonstrated that the restricting allele for the P501S-specific response is HLA-DRB1501.

### Example 13

### Identification of Prostate-Specific Antigens by Microarray Analysis

[1045] This Example describes the isolation of certain prostate-specific polypeptides from a prostate tumor cDNA library.

[1046] A human prostate tumor cDNA expression library as described above was screened using microarray analysis to identify clones that display at least a three fold over-expression in prostate tumor and/or normal prostate tissue, as compared to non-prostate normal tissues (not including testis). 372 clones were identified, and 319 were successfully sequenced. Table II presents a summary of these clones, which are shown in SEQ ID NOs: 385-400. Of these sequences SEQ ID NOs: 386, 389, 390 and 392 correspond to novel genes, and SEQ ID NOs: 393 and 396 correspond to previously identified sequences. The others (SEQ ID NOs: 385, 387, 388, 391, 394, 395 and 397-400) correspond to known sequences, as shown in Table II.

TABLE II
Summary of Prostate Tumor Antigens

| | Previously Identified | |
|---|---|---|
| Known Genes | Genes | Novel Genes |
| T-cell gamma chain | P504S | 23379 (SEQ ID |
| | | NO: 389) |
| Kallikrein | P1000C | 23399 (SEQ ID |
| | | NO: 392) |
| Vector | P501S | 23320 (SEQ ID |
| | | NO: 386) |
| CGI-82 protein mRNA | P503S | 23381 (SEQ ID |
| (23319; SEQ ID NO: 385) | | NO: 390) |
| PSA | P510S | |
| Ald. 6 Dehyd. | P784P | |
| L-iditol-2 dehydrogenase | P502S | |
| (23376; SEQ ID NO: 388) | | |
| Ets transcription factor PDEF | P706P | |
| (22672; SEQ ID NO: 398) | | |
| hTGR | 19142.2, bangur.seq | |
| (22678; SEQ ID NO: 399) | (22621; SEQ ID | |
| | NO: 396) | |
| KIAA0295 | 5566.1 Wang (23404; | |
| (22685; SEQ ID NO: 400) | SEQ ID NO: 393) | |
| Prostatic Acid Phosphatase | P712P | |
| (22655; SEQ ID NO: 397) | | |
| transglutaminase | P778P | |
| (22611; SEQ ID NO: 395) | | |
| HDLBP | | |
| (23508; SEQ ID NO: 394) | | |
| CGI-69 Protein | | |
| (23367; SEQ ID NO: 387) | | |
| KIAAO122 | | |
| (23383; SEQ ID NO: 391) | | |
| TEEG | | |

[1047] Subsequent studies led to the isolation of an extended cDNA sequence for the clone of SEQ ID NO: 329 (also referred to as P554S). This extended sequence is provided in SEQ ID NO: 967, with the corresponding amino acid sequence being provided in SEQ ID NO: 968.

[1048] CGI-82 showed 4.06 fold over-expression in prostate tissues as compared to other normal tissues tested. It was over-expressed in 43% of prostate tumors, 25% normal prostate, not detected in other normal tissues tested. L-iditol-2 dehydrogenase showed 4.94 fold over-expression in prostate tissues as compared to other normal tissues tested. It was over-expressed in 90% of prostate tumors, 100% of normal prostate, and not detected in other normal tissues tested. Ets transcription factor PDEF showed 5.55 fold over-expression in prostate tissues as compared to other normal tissues tested. It was over-expressed in 47% prostate tumors, 25% normal prostate and not detected in other normal tissues tested. hTGR1 showed 9.11 fold over-expression in prostate tissues as compared to other normal tissues tested. It was over-expressed in 63% of prostate tumors and is not detected in normal tissues tested including normal prostate. KIAA0295 showed 5.59 fold over-expression in prostate tissues as compared to other normal tissues tested. It was over-expressed in 47% of prostate tumors, low to undetectable in normal tissues tested including normal prostate tissues. Prostatic acid phosphatase showed 9.14 fold over-expression in prostate tissues as compared to other normal tissues tested. It was over-expressed in 67% of prostate tumors, 50% of normal prostate, and not detected in other normal tissues tested. Transglutaminase showed 14.84 fold over-expression in prostate tissues as compared to other normal tissues tested. It was over-expressed in 30% of prostate tumors, 50% of normal prostate, and is not detected in other normal tissues tested. High density lipoprotein binding protein (HDLBP) showed 28.06 fold over-expression in prostate tissues as compared to other normal tissues tested. It was over-expressed in 97% of prostate tumors, 75% of normal prostate, and is undetectable in all other normal tissues tested. CGI-69 showed 3.56 fold over-expression in prostate tissues as compared to other normal tissues tested. It is a low abundant gene, detected in more than 90% of prostate tumors, and in 75% normal prostate tissues. The expression of this gene in normal tissues was very low. KIAA0122 showed 4.24 fold over-expression in prostate tissues as compared to other normal tissues tested. It was over-expressed in 57% of prostate tumors, it was undetectable in all normal tissues tested including normal prostate tissues. 19142.2 bangur showed 23.25 fold over-expression in prostate tissues as compared to other normal tissues tested. It was over-expressed in 97% of prostate tumors and 100% of normal prostate. It was undetectable in other normal tissues tested. 5566.1 Wang showed 3.31 fold over-expression in prostate tissues as compared to other normal tissues tested. It was over-expressed in 97% of prostate tumors, 75% normal prostate and was also over-expressed in normal bone marrow, pancreas, and activated PBMC. Novel clone 23379 (also referred to as P553S) showed 4.86 fold over-expression in prostate tissues as compared to other normal tissues tested. It was detectable in 97% of prostate tumors and 75% normal prostate and is undetectable in all other normal tissues tested. Novel clone 23399 showed 4.09 fold over-expression in prostate tissues as compared to other normal tissues tested. It was over-expressed in 27% of prostate tumors and was undetectable in all normal tissues tested including normal prostate tissues. Novel clone 23320 showed 3.15 fold over-expression in prostate tissues as compared to other normal tissues tested. It was detectable in all prostate tumors and 50% of normal prostate tissues. It was also expressed in normal colon and trachea. Other normal tissues do not express this gene at high level.

[1049] Subsequent full-length cloning studies on P553S, using standard techniques, revealed that this clone is an incomplete spliced form of P501S. The determined cDNA sequences for four splice variants of P553S are provided in SEQ ID NO: 702-705. An amino acid sequence encoded by SEQ ID NO: 705 is provided in SEQ ID NO: 706. The cDNA sequence of SEQ ID NO: 702 was found to contain two open reading frames (ORFs). The amino acid sequences encoded by these two ORFs are provided in SEQ ID NO: 707 and 708.

### Example 14

### Identification of Prostate-Specific Antigens by Electronic Subtraction

[1050] This Example describes the use of an electronic subtraction technique to identify prostate-specific antigens.

[1051] Potential prostate-specific genes present in the GenBank human EST database were identified by electronic subtraction (similar to that described by Vasmatizis et al., Proc. Natl. Acad. Sci. USA 95:300-304, 1998). The sequences of EST clones (43,482) derived from various prostate libraries were obtained from the GenBank public human EST database. Each prostate EST sequence was used as a query sequence in a BLASTN (National Center for Biotechnology Information) search against the human EST database. All matches considered identical (length of matching sequence >100 base pairs, density of identical matches over this region >70%) were grouped (aligned) together in a cluster. Clusters containing more than 200 ESTs were discarded since they probably represented repetitive elements or highly expressed genes such as those for ribosomal proteins. If two or more clusters shared common ESTS, those clusters were grouped together into a “supercluster,” resulting in 4,345 prostate superclusters.

[1052] Records for the 479 human cDNA libraries represented in the GenBank release were downloaded to create a database of these cDNA library records. These 479 cDNA libraries were grouped into three groups: Plus (normal prostate and prostate tumor libraries, and breast cell line libraries, in which expression was desired), Minus (libraries from other normal adult tissues, in which expression was not desirable), and Other (libraries from fetal tissue, infant tissue, tissues found only in women, non-prostate tumors and cell lines other than prostate cell lines, in which expression was considered to be irrelevant). A summary of these library groups is presented in Table III.

TABLE III
Prostate cDNA Libraries and ESTs

| Library | # of Libraries | # of ESTs |
|---|---|---|
| Plus | 25 | 43,482 |
| Normal | 11 | 18,875 |
| Tumor | 11 | 21,769 |
| Cell lines | 3 | 2,838 |
| Minus | 166 | |
| Other | 287 | |

[1053] Each supercluster was analyzed in terms of the ESTs within the supercluster. The tissue source of each EST clone was noted and used to classify the superclusters into four groups: Type 1-EST clones found in the Plus group libraries only; no expression detected in Minus or Other group libraries; Type 2-EST clones derived from the Plus and Other group libraries only; no expression detected in the Minus group; Type 3-EST clones derived from the Plus, Minus and Other group libraries, but the number of ESTs derived from the Plus group is higher than in either the Minus or Other groups; and Type 4-EST clones derived from Plus, Minus and Other group libraries, but the number derived from the Plus group is higher than the number derived from the Minus group. This analysis identified 4,345 breast clusters (see Table IV). From these clusters, 3,172 EST clones were ordered from Research Genetics, Inc., and were received as frozen glycerol stocks in 96-well plates.

TABLE IV
Prostate Cluster Summary

| | # of | # of ESTs |
|---|---|---|
| Type | Superclusters | Ordered |
| 1 | 688 | 677 |
| 2 | 2899 | 2484 |
| 3 | 85 | 11 |
| 4 | 673 | 0 |
| Total | 4345 | 3172 |

[1054] The EST clone inserts were PCR-amplified using amino-linked PCR primers for Synteni microarray analysis. When more than one PCR product was obtained for a particular clone, that PCR product was not used for expression analysis. In total, 2,528 clones from the electronic subtraction method were analyzed by microarray analysis to identify electronic subtraction breast clones that had high levels of tumor vs. normal tissue mRNA. Such screens were performed using a Synteni (Palo Alto, Calif.) microarray, according to the manufacturer's instructions (and essentially as described by Schena et al., Proc. Natl. Acad. Sci. USA 93:10614-10619, 1996 and Heller et al., Proc. Natl. Acad. Sci. USA 94:2150-2155, 1997). Within these analyses, the clones were arrayed on the chip, which was then probed with fluorescent probes generated from normal and tumor prostate cDNA, as well as various other normal tissues. The slides were scanned and the fluorescence intensity was measured.

[1055] Clones with an expression ratio greater than 3 (i.e., the level in prostate tumor and normal prostate mRNA was at least three times the level in other normal tissue mRNA) were identified as prostate tumor-specific sequences (Table V). The sequences of these clones are provided in SEQ ID NO: 401-453, with certain novel sequences shown in SEQ ID NO: 407, 413, 416-419, 422, 426, 427 and 450.

TABLE V
Prostate-tumor Specific Clones

| | Sequence | |
|---|---|---|
| SEQ ID NO. | Designation | Comments |
| 401 | 22545 | previously identified P1000C |
| 402 | 22547 | previously identified P704P |
| 403 | 22548 | known |
| 404 | 22550 | known |
| 405 | 22551 | PSA |
| 406 | 22552 | prostate secretory protein 94 |
| 407 | 22553 | novel |
| 408 | 22558 | previously identified P509S |
| 409 | 22562 | glandular kallikrein |
| 410 | 22565 | previously identified P1000C |
| 411 | 22567 | PAP |
| 412 | 22568 | B1006C (breast tumor antigen) |
| 413 | 22570 | novel |
| 414 | 22571 | PSA |
| 415 | 22572 | previously identified P706P |
| 416 | 22573 | novel |
| 417 | 22574 | novel |
| 418 | 22575 | novel |
| 419 | 22580 | novel |
| 420 | 22581 | PAP |
| 421 | 22582 | prostatic secretory protein 94 |
| 422 | 22583 | novel |
| 423 | 22584 | prostatic secretory protein 94 |
| 424 | 22585 | prostatic secretory protein 94 |
| 425 | 22586 | known |
| 426 | 22587 | novel |
| 427 | 22588 | novel |
| 428 | 22589 | PAP |
| 429 | 22590 | known |
| 430 | 22591 | PSA |
| 431 | 22592 | known |
| 432 | 22593 | Previously identified P777P |
| 433 | 22594 | T cell receptor gamma chain |
| 434 | 22595 | Previously identified P705P |
| 435 | 22596 | Previously identified P707P |
| 436 | 22847 | PAP |
| 437 | 22848 | known |
| 438 | 22849 | prostatic secretory protein 57 |
| 439 | 22851 | PAP |
| 440 | 22852 | PAP |
| 441 | 22853 | PAP |
| 442 | 22854 | previously identified P509S |
| 443 | 22855 | previously identified P705P |
| 444 | 22856 | previously identified P774P |
| 445 | 22857 | PSA |
| 446 | 23601 | previously identified P777P |
| 447 | 23602 | PSA |
| 448 | 23605 | PSA |
| 449 | 23606 | PSA |
| 450 | 23612 | novel |
| 451 | 23614 | PSA |
| 452 | 23618 | previously identified P1000C |
| 453 | 23622 | previously identified P705P |

[1056] Further studies on the clone of SEQ ID NO: 407 (also referred to as P1020C) led to the isolation of an extended cDNA sequence provided in SEQ ID NO: 591. This extended cDNA sequence was found to contain an open reading frame that encodes the amino acid sequence of SEQ ID NO: 592. The P1020C cDNA and amino acid sequences were found to show some similarity to the human endogenous retroviral HERV-K pol gene and protein.

### Example 15

### Further Identification of Prostate-Specific Antigens by Microarray Analysis

[1057] This Example describes the isolation of additional prostate-specific polypeptides from a prostate tumor cDNA library.

[1058] A human prostate tumor cDNA expression library as described above was screened using microarray analysis to identify clones that display at least a three fold over-expression in prostate tumor and/or normal prostate tissue, as compared to non-prostate normal tissues (not including testis). 142 clones were identified and sequenced. Certain of these clones are shown in SEQ ID NO: 454-467. Of these sequences, SEQ ID NO: 459-460 represent novel genes. The others (SEQ ID NO: 454-458 and 461-467) correspond to known sequences. Comparison of the determined cDNA sequence of SEQ ID NO: 461 with sequences in the Genbank database using the BLAST program revealed homology to the previously identified transmembrane protease serine 2 (TMPRSS2). The full-length cDNA sequence for this clone is provided in SEQ ID NO: 894, with the corresponding amino acid sequence being provided in SEQ ID NO: 895. The cDNA sequence encoding the first 209 amino acids of TMPRSS2 is provided in SEQ ID NO: 896, with the first 209 amino acids being provided in SEQ ID NO: 897.

[1059] The sequence of SEQ ID NO: 462 (referred to as P835P) was found to correspond to the previously identified clone FLJ13518 (Accession AK023643; SEQ ID NO: 917), which had no associated open reading frame (ORF). This clone was used to search the Geneseq DNA database and matched a clone previously identified as a G protein-coupled receptor protein (DNA Geneseq Accession A09351; amino acid Geneseq Accession Y92365), that is characterized by the presence of seven transmembrane domains. The sequences of fragments between these domains are provided in SEQ ID NO: 921-928, with SEQ ID NO: 921, 923, 925 and 927 representing extracellular domains and SEQ ID NO: 922, 924, 926 and 928 representing intracellular domains. SEQ ID NO: 921-928 represent amino acids 1-28, 53-61, 83-103, 124-143, 165-201, 226-238, 263-272 and 297-381, respectively, of P835P. The full-length cDNA sequence for P835P is provided in SEQ ID NO: 916. The cDNA sequence of the open reading frame for P835P, including stop codon, is provided in SEQ ID NO: 918, with the open reading frame without stop codon being provided in SEQ ID NO: 919 and the corresponding amino acid sequence being provided in SEQ ID NO: 920.

### Example 16

### Further Characterization of Prostate-Specific Antigen P710P

[1060] This Example describes the full length cloning of P710P.

[1061] The prostate cDNA library described above was screened with the P710P fragment described above. One million colonies were plated on LB/Ampicillin plates. Nylon membrane filters were used to lift these colonies, and the cDNAs picked up by these filters were then denatured and cross-linked to the filters by UV light. The P710P fragment was radiolabeled and used to hybridize with the filters. Positive cDNA clones were selected and their cDNAs recovered and sequenced by an automatic Perkin Elmer/Applied Biosystems Division Sequencer. Four sequences were obtained, and are presented in SEQ ID NO: 468-471. These sequences appear to represent different splice variants of the P710P gene. Subsequent comparison of the cDNA sequences of P710P with those in Genbank releaved homology to the DD3 gene (Genbank accession numbers AF103907 & AF103908). The cDNA sequence of DD3 is provided in SEQ ID NO: 690.

### Example 17

### Protein Expression of Prostate-Specific Antigens

[1062] This example describes the expression and purification of prostate-specific antigens in E. coli, baculovirus and mammalian cells.

[1063] a) Expression of P501S in E. coli

[1064] Expression of the full-length form of P501S was attempted by first cloning P501S without the leader sequence (amino acids 36-553 of SEQ ID NO: 113) downstream of the first 30 amino acids of the M. tuberculosis antigen Ra12 (SEQ ID NO: 484) in pET17b. Specifically, P501S DNA was used to perform PCR using the primers AW025 (SEQ ID NO: 485) and AW003 (SEQ ID NO: 486). AW025 is a sense cloning primer that contains a HindIII site. AW003 is an antisense cloning primer that contains an EcoRI site. DNA amplification was performed using 5 μl 10× Pfu buffer, 1 μl 20 mM dNTPs, 1 μl each of the PCR primers at 10 μM concentration, 40 μl water, 1 μl Pfu DNA polymerase (Stratagene, La Jolla, Calif.) and 1 μl DNA at 100 ng/μl. Denaturation at 95° C. was performed for 30 sec, followed by 10 cycles of 95° C. for 30 sec, 60° C. for 1 min and by 72° C. for 3 min. 20 cycles of 95° C. for 30 sec, 65° C. for 1 min and by 72° C. for 3 min, and lastly by 1 cycle of 72° C. for 10 min. The PCR product was cloned to Ra12m/pET17b using HindIII and EcoRI. The sequence of the resulting fusion construct (referred to as Ra12-P501S-F) was confirmed by DNA sequencing.

[1065] The fusion construct was transformed into BL21(DE3)pLysE, pLysS and CodonPlus E. coli (Stratagene) and grown overnight in LB broth with kanamycin. The resulting culture was induced with IPTG. Protein was transferred to PVDF membrane and blocked with 5% non-fat milk (in PBS-Tween buffer), washed three times and incubated with mouse anti-His tag antibody (Clontech) for 1 hour. The membrane was washed 3 times and probed with HRP-Protein A (Zymed) for 30 min. Finally, the membrane was washed 3 times and developed with ECL (Amersham). No expression was detected by Western blot. Similarly, no expression was detected by Western blot when the Ra12-P501S-F fusion was used for expression in BL21CodonPlus by CE6 phage (Invitrogen).

[1066] An N-terminal fragment of P501S (amino acids 36-325 of SEQ ID NO: 113) was cloned down-stream of the first 30 amino acids of the M. tuberculosis antigen Ra12 in pET17b as follows. P501S DNA was used to perform PCR using the primers AW025 (SEQ ID NO: 485) and AW027 (SEQ ID NO: 487). AW027 is an antisense cloning primer that contains an EcoRI site and a stop codon. DNA amplification was performed essentially as described above. The resulting PCR product was cloned to Ra12 in pET17b at the HindIII and EcoRI sites. The fusion construct (referred to as Ra12-P501S-N) was confirmed by DNA sequencing.

[1067] The Ra12-P501S-N fusion construct was used for expression in BL21(DE3)pLysE, pLysS and CodonPlus, essentially as described above. Using Western blot analysis, protein bands were observed at the expected molecular weight of 36 kDa. Some high molecular weight bands were also observed, probably due to aggregation of the recombinant protein. No expression was detected by Western blot when the Ra12-P501S-F fusion was used for expression in BL21CodonPlus by CE6 phage.

[1068] A fusion construct comprising a C-terminal portion of P501S (amino acids 257-553 of SEQ ID NO: 113) located down-stream of the first 30 amino acids of the M. tuberculosis antigen Ra12 (SEQ ID NO: 484) was prepared as follows. P501S DNA was used to perform PCR using the primers AW026 (SEQ ID NO: 488) and AW003 (SEQ ID NO: 486). AW026 is a sense cloning primer that contains a HindIII site. DNA amplification was performed essentially as described above. The resulting PCR product was cloned to Ra12 in pET17b at the HindlIl and EcoRI sites. The sequence for the fusion construct (referred to as Ra12-P501S-C) was confirmed.

[1069] The Ra12-P501S-C fusion construct was used for expression in BL21(DE3)pLysE, pLysS and CodonPlus, as described above. A small amount of protein was detected by Western blot, with some molecular weight aggregates also being observed. Expression was also detected by Western blot when the Ra12-P501S-C fusion was used for expression in BL21CodonPlus induced by CE6 phage.

[1070] A fusion construct comprising a fragment of P501S (amino acids 36-298 of SEQ ID NO: 113) located down-stream of the M. tuberculosis antigen Ra12 (SEQ ID NO: 848) was prepared as follows. P501S DNA was used to perform PCR using the primers AW042 (SEQ ID NO: 849) and AW053 (SEQ ID NO: 850). AW042 is a sense cloning primer that contains a EcoRI site. AW053 is an antisense primer with stop and Xho I sites. DNA amplification was performed essentially as described above. The resulting PCR product was cloned to Ra12 in pET17b at the EcoRI and Xho I sites. The resulting fusion construct (referred to as Ra12-P501S-E2) was expressed in B834 (DE3) pLys S E. coli host cells in TB media for 2 h at room temperature. Expressed protein was purified by washing the inclusion bodies and running on a Ni-NTA column. The purified protein stayed soluble in buffer containing 20 mM Tris-HCl (pH 8), 100 mM NaCl, 10 mM β-Me and 5% glycerol. The determined cDNA and amino acid sequences for the expressed fusion protein are provided in SEQ ID NO: 851 and 852, respectfully.

[1071] b) Expression of P501S in Baculovirus

[1072] The Bac-to-Bac baculovirus expression system (BRL Life Technologies, Inc.) was used to express P501S protein in insect cells. Full-length P501S (SEQ ID NO: 113) was amplified by PCR and cloned into the XbaI site of the donor plasmid pFastBacI. The recombinant bacmid and baculovirus were prepared according to the manufacturer's instructions. The recombinant baculovirus was amplified in Sf9 cells and the high titer viral stocks were utilized to infect High Five cells (Invitrogen) to make the recombinant protein. The identity of the full-length protein was confirmed by N-terminal sequencing of the recombinant protein and by Western blot analysis (FIG. 7). Specifically, 0.6 million High Five cells in 6-well plates were infected with either the unrelated control virus BV/ECD_PD (lane 2), with recombinant baculovirus for P501S at different amounts or MOIs (lanes 4-8), or were uninfected (lane 3). Cell lysates were run on SDS-PAGE under reducing conditions and analyzed by Western blot with the anti-P501S monoclonal antibody P501S-10E3-G4D3 (prepared as described below). Lane 1 is the biotinylated protein molecular weight marker (BioLabs).

[1073] The localization of recombinant P501S in the insect cells was investigated as follows. The insect cells overexpressing P501S were fractionated into fractions of nucleus, mitochondria, membrane and cytosol. Equal amounts of protein from each fraction were analyzed by Western blot with a monoclonal antibody against P501S. Due to the scheme of fractionation, both nucleus and mitochondria fractions contain some plasma membrane components. However, the membrane fraction is basically free from mitochondria and nucleus. P501S was found to be present in all fractions that contain the membrane component, suggesting that P501S may be associated with plasma membrane of the insect cells expressing the recombinant protein.

[1074] c) Expression of P501S in Mammalian Cells

[1075] Full-length P501S (553 amino acids; SEQ ID NO: 113) was cloned into various mammalian expression vectors, including pCEP4 (Invitrogen), pVR1012 (Vical, San Diego, Calif.) and a modified form of the retroviral vector pBMN, referred to as pBIB. Transfection of P501S/pCEP4 and P501S/pVR1012 into HEK293 fibroblasts was carried out using the Fugene transfection reagent (Boehringer Mannheim). Briefly, 2 ul of Fugene reagent was diluted into 100 ul of serum-free media and incubated at room temperature for 5-10 min. This mixture was added to 1 ug of P501S plasmid DNA, mixed briefly and incubated for 30 minutes at room temperature. The Fugene/DNA mixture was added to cells and incubated for 24-48 hours. Expression of recombinant P501S in transfected HEK293 fibroblasts was detected by means of Western blot employing a monoclonal antibody to P501S.

[1076] Transfection of p501S/pCEP4 into CHO-K cells (American Type Culture Collection, Rockville, Md.) was carried out using GenePorter transfection reagent (Gene Therapy Systems, San Diego, Calif.). Briefly, 15 μl of GenePorter was diluted in 500 μl of serum-free media and incubated at room temperature for 10 min. The GenePorter/media mixture was added to 2 μg of plasmid DNA that was diluted in 500 μl of serum-free media, mixed briefly and incubated for 30 min at room temperature. CHO-K cells were rinsed in PBS to remove serum proteins, and the GenePorter/DNA mix was added and incubated for 5 hours. The transfected cells were then fed an equal volume of 2× media and incubated for 24-48 hours.

[1077] FACS analysis of P501S transiently infected CHO-K cells, demonstrated surface expression of P501S. Expression was detected using rabbit polyclonal antisera raised against a P501S peptide, as described below. Flow cytometric analysis was performed using a FaCScan (Becton Dickinson), and the data were analyzed using the Cell Quest program.

[1078] d) Expression of P703P in Baculovirus

[1079] The cDNA for full-length P703P-DE5 (SEQ ID NO: 326), together with several flanking restriction sites, was obtained by digesting the plasmid pCDNA703 with restriction endonucleases Xba I and Hind III. The resulting restriction fragment (approx. 800 base pairs) was ligated into the transfer plasmid pFastBacl which was digested with the same restriction enzymes. The sequence of the insert was confirmed by DNA sequencing. The recombinant transfer plasmid pFBP703 was used to make recombinant bacmid DNA and baculovirus using the Bac-To-Bac Baculovirus expression system (BRL Life Technologies). High Five cells were infected with the recombinant virus BVP703, as described above, to obtain recombinant P703P protein.

[1080] e) Expression of P788P in E. Coli

[1081] A truncated, N-terminal portion, of P788P (residues 1-644 of SEQ ID NO: 777; referred to as P788P-N) fused with a C-terminal 6×His Tag was expressed in E. coli as follows. P788P cDNA was amplified using the primers AW080 and AW081 (SEQ ID NO: 815 and 816). AW080 is a sense cloning primer with an NdeI site. AW081 is an antisense cloning primer with a XhoI site. The PCR-amplified P788P, as well as the vector pCRX1, were digested with NdeI and XhoI. Vector and insert were ligated and transformed into NovaBlue cells. Colonies were randomly screened for insert and then sequenced. P788P-N clone #6 was confirmed to be identical to the designed construct. The expression construct P788P-N #6/pCRX1 was transformed into E. coli BL21 CodonPlus-RIL competent cells. After induction, most of the cells grew well, achieving OD600 of greater than 2.0 after 3 hr. Coomassie stained SDS-PAGE showed an over-expressed band at about 75 kD. Western blot analysis using a 6×HisTag antibody confirmed the band was P788P-N. The determined cDNA sequence for P788P-N is provided in SEQ ID NO: 817, with the corresponding amino acid sequence being provided in SEQ ID NO: 818.

[1082] f) Expression of P510S in E. coli

[1083] The P510S protein has 9 potential transmembrane domains and is predicted to be located at the plasma membrane. The C-terminal protein of this protein, as well as the predicted third extracellular domain of P510S were expressed in E. coli as follows.

[1084] The expression construct referred to as Ra12-P501S-C was designed to have a 6 HisTag at the N-terminal enc, followed by the M. tuberculosis antigen Ra12 (SEQ ID NO: 819) and then the C-terminal portion of P510S (amino residues 1176-1261 of SEQ ID NO: 538). Full-length P5105 was used to amplify the P510S-C fragment by PCR using the primers AW056 and AW057 (SEQ ID NO: 820 and 821, respectively). AW056 is a sense cloning primer with an EcoRI site. AW057 is an antisense primer with stop and XhoI sites. The amplified P501S fragment and Ra12/pCRX1 were digested with EcoRI and XhoI and then purified. The insert and vector were ligated together and transformed into NovaBlue. Colonies were randomly screened for insert and sequences. For protein expression, the expression construct was transformed into E. coli BL21 (DE3) CodonPlus-RIL competent cells. A mini-induction screen was performed to optimize the expression conditions. After induction the cells grew well, achieving OD 600 nm greater than 2.0 after 3 hours. Coomassie stain SDS-PAGE showed a highly over-expressed band at approx. 30 kD. Though this is higher than the expected molecular weight, western blot analysis was positive, showing this band to be the His tag-containing protein. The optimized culture conditions are as follows. Dilute overnight culture/daytime culture (LB+kanamycin+chloramphenicol) into 2×YT (with kanamycin and chloramphenicol) at a ratio of 25 ml culture to 1 liter 2×YT. Allow to grow at 37° C. until OD600=0.6. Take an aliquot out as T0 sample. Add 1 mM IPTG and allow to grow at 30° C. for 3 hours. Take out a T3 sample, spin down cells and store at −80° C. The determined cDNA and amino acid sequences for the Ra12-P510S-C construct are provided in SEQ ID NO: 822 and 825, respectively.

[1085] The expression construct P510S-C was designed to have a 5′ added start codon and a glycine (GGA) codon and then the P510S C terminal fragment followed by the in frame 6× histidine tag and stop codon from the pET28b vector. The cloning strategy is similar to that used for Ra12-P510S-C, except that the PCR primers employed were those shown in SEQ ID NO: 828 and 829, respectively and the NcoI/XhoI cut in pET28b was used. The primer of SEQ ID NO: 828 created a 5′ NcoI site and added a start codon. The antisense primer of SEQ ID NO: 829 creates a XhoI site on P510S C terminal fragment. Clones were confirmed by sequencing. For protein expression, the expression construct was transformed into E. coli BL21 (DE3) CodonPlus-RIL competent cells. An OD600 of greater than 2.0 was obtained 30 hours after induction. Coomassie stained SDS-PAGE showed an over-expressed band at about 11 kD. Western blot analysis confirmed that the band was P510S-C, as did N-terminal protein sequencing. The optimized culture conditions are as follows: dilute overnight culture/daytime culture (LB+kanarnycin+chloramphenicol) into 2× YT (+kanamycin and chloramphenicol) at a ratio of 25 mL culture to 1 liter 2× YT, and allow to grow at 37° C. until an OD 600 of about 0.5 is reached. Take out an aliquot as T0 sample. Add 1 mM IPTG and allow to grow at 30° C. for 3 hours. Spin down the cells and store at −80° C. until purification. The determined cDNA and amino acid sequences for the P510S-C construct are shown in SEQ ID NO: 823 and 826, respectively.

[1086] The predicted third extracellular domain of P510S (P510S-E3; residues 328-676 of SEQ ID NO: 538) was expressed in E. coli as follows. The P510S fragment was amplified by PCR using the primers shown in SEQ ID NO: 830 and 831. The primer of SEQ ID NO: 830 is a sense primer with an NdeI site for use in ligating into pPDM. The primer of SEQ ID NO: 831 is an antisense primer with an added XhoI site for use in ligating into pPDM. The resulting fragment was cloned to pPDM at the NdeI and XhoI sites. Clones were confirmed by sequencing. For protein expression, the clone was transformed into E. coli BL21 (DE3) CodonPlus-RIL competent cells. After induction, an OD600 of greater than 2.0 was achieved after 3 hours. Coomassie stained SDS-PAGE showed an over-expressed band at about 39 kD, and N-terminal sequencing confirmed the N-terminal to be that of P510S-E3. Optimized culture conditions are as follows: dilute overnight culture/daytime culture (LB+kanamycin+chloramphenicol) into 2× YT (kanamycin and chloramphenicol) at a ratio of 25 ml culture to 1 liter 2× YT. Allow to grow at 37° C. until OD 600 equals 0.6. Take out an aliquot as T0 sample. Add 1 mM IPTG and allow to grow at 30° C. for 3 hours. Take out a T3 sample, spin down the cells and store at −80° C. until purification. The determined cDNA and amino acid sequences for the P501S-E3 construct are provided in SEQ ID NO: 824 and 827, respectively.

[1087] g) Expression of P775S in E. coli

[1088] The antigen P775P contains multiple open reading frames (ORF). The third ORF, encoding the protein of SEQ ID NO: 483, has the best emotif score. An expression fusion construct containing the M. tuberculosis antigen Ra12 (SEQ ID NO: 819) and P775P-ORF3 with an N-terminal 6× HisTag was prepared as follows. P775P-ORF3 was amplified using the sense PCR primers of SEQ ID NO: 832 and the anti-sense PCR primer of SEQ ID NO: 833. The PCR amplified fragment of P775P and Ra12/pCRX1 were digested with the restriction enzymes EcoRI and XhoI. Vector and insert were ligated and then transformed into NovaBlue cells. Colonies were randomly screened for insert and then sequenced. A clone having the desired sequence was transformed into E. coli BL21 (DE3) CodonPlus-RIL competent cells. Two hours after induction, the cell density peaked at OD600 of approximately 1.8. Coomassie stained SDS-PAGE showed an over-expressed band at about 31 kD. Western blot using 6× HisTag antibody confirmed that the band was Ra12-P775P-ORF3. The determined cDNA and amino acid sequences for the fusion construct are provided in SEQ ID NO: 834 and 835, respectively.

[1089] h) Expression of a P703P His Tag Fusion Protein in E. coli

[1090] The cDNA for the coding region of P703P was prepared by PCR using the primers of SEQ ID NO: 836 and 837. The PCR product was digested with EcoRI restriction enzyme, gel purified and cloned into a modified pET28 vector with a His tag in frame, which had been digested with Eco72I and EcoRI restriction enzymes. The correct construct was confirmed by DNA sequence analysis and then transformed into E. coli BL21 (DE3) pLys S expression host cells. The determined amino acid and cDNA sequences for the expressed recombinant P703P are provided in SEQ ID NO: 838 and 839, respectively.

[1091] i) Expression of a P705P His Tag Fusion Protein in E. coli

[1092] The cDNA for the coding region of P705P was prepared by PCR using the primers of SEQ ID NO: 840 and 841. The PCR product was digested with EcoRI restriction enzyme, gel purified and cloned into a modified pET28 vector with a His tag in frame, which had been digested with Eco72I and EcoRI restriction enzymes. The correct construct was confirmed by DNA sequence analysis and then transformed into E. coli BL21 (DE3) pLys S and BL21 (DE3) CodonPlus expression host cells. The determined amino acid and cDNA sequences for the expressed recombinant P705P are provided in SEQ ID NO: 842 and 843, respectively.

[1093] i) Expression of a P711P His Tag Fusion Protein in E. coli

[1094] The cDNA for the coding region of P711P was prepared by PCR using the primers of SEQ ID NO: 844 and 845. The PCR product was digested with EcoRI restriction enzyme, gel purified and cloned into a modified pET28 vector with a His tag in frame, which had been digested with Eco72I and EcoRI restriction enzymes. The correct construct was confirmed by DNA sequence analysis and then transformed into E. coli BL21 (DE3) pLys S and BL21 (DE3) CodonPlus expression host cells. The determined amino acid and cDNA sequences for the expressed recombinant P711P are provided in SEQ ID NO: 846 and 847, respectively.

[1095] k) Expression of P767P in E. coli

[1096] The full-length coding region of P767P (amino acids 2-374 of SEQ ID NO: 590) was amplified by PCR using the primers PDM-468 and PDM-469 (SEQ ID NO: 935 and 936, respectively). DNA amplification was performed using 10 μl 10× Pfu buffer, 1 μl 10 mM dNTPs, 2 μl each of the PCR primers at 10 μM concentration, 83 μl water, 1.5 μl Pfu DNA polymerase (Stratagene, La Jolla, Calif.) and 1 μl DNA at 100 ng/μl. Denaturation at 96° C. was performed for 2 min, followed by 40 cycles of 96° C. for 20 sec, 66° C. for 15 sec and by 72° C. for 2 min., and lastly by 1 cycle of 72° C. for 4 min. The PCR product was digested with XhoI and cloned into a modified pET28 vector with a histidine tag in frame on the 5′ end that was digested with Eco72I and XhoI. The construct was confirmed to be correct through sequence analysis and transformed into E. coli BL21 pLysS and BL21 CodonPlus RP cells. The cDNA coding region for the recombinant B767P protein is provided in SEQ ID NO: 938, with the corresponding amino acid sequence being provided in SEQ ID NO: 941. The full-length P767P did not express at high enough levels for detection or purification.

[1097] A truncated coding region of P767P (referred to as B767P-B; amino acids 47-374 of SEQ ID NO: 590) was amplified by PCR using the primers PDM-573 and PDM-469 (SEQ ID NO: 937 and 936, respectively) and the PCR conditions described above for full-length P767P. The PCR product was digested with XhoI and cloned into the modified pET28 vector that was digested with Eco72I and XhoI. The construct was confirmed to be correct through sequence analysis and transformed into E. coli BL21 pLysS and BL21 CodonPlus RP cells. The protein was found to be expressed in the inclusion body pellet. The coding region for the expressed B767P-B protein is provided in SEQ ID NO: 939, with the corresponding amino acid sequence being provided in SEQ ID NO: 940.

[1098] l) Expression of P767P in Mammalian Cells

[1099] For recombinant expression in mammalian cells, the full length P767P cDNA (SEQ ID NO: 587) was subcloned into the mammalian expression vector pCEP4 (Invitrogen) that was modified to contain a FLAG epitope tag. This construct was transfected into HEK293 cells (American Type Culture Collection) using Fugene 6 reagent (Roche). Briefly, the HEK cells were plated at a density of 100,000 cells/ml in DMEM (Gibco) containing 10% FBS (Hyclone) and grown overnight. The following day, 2 ul of Fugene 6 was added to 100 ul of DMEM containing no FBS and incubated for 15 minutes at room temperature. The Fugene 6/DMEM mixture was then added to 1 ug of P767P/pCEP4 plasmid DNA and incubated for 15 minutes at room temperature. The Fugene/DNA mix was then added to the HEK293 cells and incubated for 48-72 hrs at 37° C. with 7% CO₂. Cells were rinsed with PBS then collected and pelleted by centrifugation.

[1100] P767P expression was detect in transfected HEK293 whole cell lysates by Western blot analysis using an anti-epitope tag antibody. Specifically, whole cell lysates were generated by incubating the cells in Triton-X100 containing lysis buffer for 30 minutes on ice. Lysates were then cleared by centrifugation at 5,000 rpm for 5 minutes at 4° C. Samples were diluted with SDS-PAGE loading buffer containing beta-mercaptoethanol, then boiled for 10 minutes prior to loading the SDS-PAGE gel. Protein was transferred to nitrocellulose and probed using an anti-FLAG mouse monoclonal antibody (Sigma) at a dilution of 1 ug/ml. The blot was revealed with a donkey anti-mouse Ig coupled to HRP followed by incubation in ECL substrate.

[1101] P767P was found to be expressed on the surface of transfeced HEK293 cells by flow cytometry using rabbit anti-P767P sera as follows. Cells were collected and washed with ice cold staining buffer (PBS+1% BSA+Azide). Next, the cells were incubated for 30 minutes on ice with undiluted anti-P767P rabbit polyclonal sera. The cells were washed 3 times with staining buffer and then incubated with a 1:100 dilution of a goat anti-rabbit Ig(H+L)-FITC reagent (Southern Biotechnology) for 30 minutes on ice. Following 3 washes, the cells were resuspended in staining buffer containing Propidium Iodide (PI), a vital stain that allows for identification of permeable cells, and analyzed by FACS.

[1102] m) Expression of P788P in Mammalian Cells

[1103] For recombinant expression in mammalian cells, the full length P788P cDNA was subcloned into the mammalian expression vector pcDNA3.1 (Invitrogen). This construct was transfected into HEK293 cells (American Type Culture Collection) using Fugene 6 reagent (Roche). Briefly, the HEK cells were plated at a density of 100,000 cells/ml in DMEM (Gibco) containing 10% FBS (Hyclone) and grown overnight. The following day, 2 ul of Fugene6 was added to 100 ul of DMEM containing no FBS and incubated for 15 minutes at room temperature. The Fugene6/DMEM mixture was then added to 1 ug of P788P/pcDNA3.1 plasmid DNA and incubated for 15 minutes at room temperature. The Fugene/DNA mix was then added to the HEK293 cells and incubated for 48-72 hrs at 37° C. with 7% CO₂. Cells were rinsed with PBS then collected and pelleted by centrifugation.

[1104] P788P expression was detected in transfected HEK293 whole cell lysates by Western blot analysis using rabbit anti-P788P sera as probe. Specifically, whole cell lysates were generated by incubating the cells in Triton-X100 containing lysis buffer for 30 minutes on ice. Lysates were then cleared by centrifugation at 5,000 rpm for 5 minutes at 4° C. Samples were diluted with SDS-PAGE loading buffer containing beta-mercaptoethanol, then boiled for 10 minutes prior to loading the SDS-PAGE gel. Protein was transferred to nitrocellulose and probed using purified anti-P788P rabbit polyclonal sera at a concentration of 1 ug/ml. The blot was revealed with a donkey anti-rabbit Ig coupled to HRP (Jackson ImmunoResearch) followed by incubation in ECL substrate.

[1105] P788P expression was detected on the surface of transfected HEK293 cells by flow cytometery using rabbit anti-P788P sera. For FACS analysis, cells were collected and washed with ice cold staining buffer (PBS+1% BSA+Azide). Next, the cells were incubated for 30 minutes on ice with anti-P788P polyclonal sera (10 ug/ml final concentration). The cells were washed 3 times with staining buffer and then incubated with a 1:100 dilution of a goat anti-rabbit Ig(H+L)-FITC reagent (Southern Biotechnology) for 30 minutes on ice. Following 3 washes, the cells were resuspended in staining buffer containing Propidium Iodide (PI), a vital stain that allows for identification of permeable cells, and analyzed by flow cytometry.

### Example 18

### Preparation and Characterization of Antibodies Against Prostate-Specific Polypeptides

[1106] a) Preparation and Characterization of Polyclonal Antibodies Against P703P, P504S and P509S

[1107] Polyclonal antibodies against P703P, P504S, P509S, P501S, P510S-E3, P510S-C, P705P, full-length P703P (referred to as P703PFL), P711P, P767P, P788P-N, and peptides of P790P and P775P were prepared as follows. The amino acid sequences of the P790P peptides (referred to as P790P89, P790P120, P790P163, P790P180, P790P222, P790P261, P790P287 and P790P307, respectively) are provided in SEQ ID NO: 949-956, with the amino acid sequences of the P775P peptides being provided in SEQ ID NO: 957-966.

[1108] Each prostate tumor antigen expressed in an E. coli recombinant expression system was grown overnight in LB broth with the appropriate antibiotics at 37° C. in a shaking incubator. The next morning, 10 ml of the overnight culture was added to 500 ml to 2× YT plus appropriate antibiotics in a 2L-baffled Erlenmeyer flask. When the Optical Density (at 560 nm) of the culture reached 0.4-0.6, the cells were induced with IPTG (1 mM). Four hours after induction with IPTG, the cells were harvested by centrifugation. The cells were then washed with phosphate buffered saline and centrifuged again. The supernatant was discarded and the cells were either frozen for future use or immediately processed. Twenty ml of lysis buffer was added to the cell pellets and vortexed. To break open the E. coli cells, this mixture was then run through the French Press at a pressure of 16,000 psi. The cells were then centrifuged again and the supernatant and pellet were checked by SDS-PAGE for the partitioning of the recombinant protein. For proteins that localized to the cell pellet, the pellet was resuspended in 10 mM Tris pH 8.0, 1% CHAPS and the inclusion body pellet was washed and centrifuged again. This procedure was repeated twice more. The washed inclusion body pellet was solubilized with either 8 M urea or 6 M guanidine HCl containing 10 mM Tris pH 8.0 plus 10 mM imidazole. The solubilized protein was added to 5 ml of nickel-chelate resin (Qiagen) and incubated for 45 min to 1 hour at room temperature with continuous agitation. After incubation, the resin and protein mixture were poured through a disposable column and the flow through was collected. The column was then washed with 10-20 column volumes of the solubilization buffer. The antigen was then eluted from the column using 8M urea, 10 mM Tris pH 8.0 and 300 mM imidazole and collected in 3 ml fractions. A SDS-PAGE gel was run to determine which fractions to pool for further purification.

[1109] As a final purification step, a strong anion exchange resin such as HiPrepQ (Biorad) was equilibrated with the appropriate buffer and the pooled fractions from above were loaded onto the column. Each antigen was eluted off the column with a increasing salt gradient. Fractions were collected as the column was run and another SDS-PAGE gel was run to determine which fractions from the column to pool. The pooled fractions were dialyzed against 10 mM Tris pH 8.0. The proteins were then vialed after filtration through a 0.22 micron filter and the antigens were frozen until needed for immunization.

[1110] The P790P and P775P peptides were synthesized, conjugated to KLH and frozen until needed for immunization.

[1111] Four hundred micrograms of each prostate antigen or peptide was combined with 100 micrograms of muramyldipeptide (MDP) and injected into a rabbit. Every four weeks rabbits were boosted with 100 micrograms of antigen/peptide mixed with an equal volume of Incomplete Freund's Adjuvant (IFA). Seven days following each boost, the animal was bled. Sera were generated by incubating the blood at 4° C. for 12-24 hours followed by centrifugation.

[1112] Ninety-six well plates were coated with antigen by incubating with 50 microliters (typically 1 microgram/microliter) of recombinant protein at 4° C. for 20 hours. 250 microliters of BSA blocking buffer was added to the wells and incubated at room temperature for 2 hours. Plates were washed 6 times with PBS/0.1% Tween. Rabbit sera was diluted in PBS/0.1% Tween/0.1% BSA. Fifty microliters of diluted sera was added to each well and incubated at room temperature for 30 min. Plates were washed as described above before 50 microliters of goat anti-rabbit horse radish peroxidase (HRP) at a 1:10000 dilution was added and incubated at room temperature for 30 min. Plates were again washed as described above and 100 microliters of TMB microwell peroxidase substrate was added to each well. Following a 15 min incubation in the dark at room temperature, the calorimetric reaction was stopped with 100 microliters of 1N H₂SO₄ and read immediately at 450 nm. All polyclonal antibodies showed immunoreactivity to the appropriate antigen or peptide.

[1113] In order to determine which tissues express P509S, immunohistochemistry (IHC) analysis was performed on a diverse range of tissue sections. Tissue samples were fixed in formalin solution for 12-24 hrs and embedded in paraffin before being sliced into 8 micron sections. Steam heat induced epitope retrieval (SHIER) in 0.1 M sodium citrate buffer (pH 6.0) was used for optimal staining conditions. Sections were incubated with 10% serum/PBS for 5 minutes. Primary antibody was added to each section for 25 minutes at indicated concentrations followed by 25 minute incubation with either anti-rabbit or anti-mouse biotinylated antibody. Endogenous peroxidase activity was blocked by three 1.5 minute incubations with hydrogen peroxidase. The avidin biotin complex/horse radish peroxidase (ABC/HRP) system was used along with DAB chromogen to visualize antigen expression. Slides were counterstained with hematoxylin to visualize cell nuclei. P509S expression was detected in prostate cancer, BPH, colon, and kidney but not in heart, lung and liver.

[1114] b) Preparation and Characterization of Antibodies against P501S

[1115] A murine monoclonal antibody directed against the carboxy-terminus of the prostate-specific antigen P501S was prepared as follows.

[1116] A truncated fragment of P501S (amino acids 355-526 of SEQ ID NO: 113) was generated and cloned into the pET28b vector (Novagen) and expressed in E. coli as a thioredoxin fusion protein with a histidine tag. The trx-P501S fusion protein was purified by nickel chromatography, digested with thrombin to remove the trx fragment and further purified by an acid precipitation procedure followed by reverse phase HPLC.

[1117] Mice were immunized with truncated P501S protein. Serum bleeds from mice that potentially contained anti-P501S polyclonal sera were tested for P501S-specific reactivity using ELISA assays with purified P501S and trx-P501S proteins. Serum bleeds that appeared to react specifically with P501S were then screened for P501S reactivity by Western analysis. Mice that contained a P501S-specific antibody component were sacrificed and spleen cells were used to generate anti-P501S antibody producing hybridomas using standard techniques. Hybridoma supernatants were tested for P501S-specific reactivity initially by ELISA, and subsequently by FACS analysis of reactivity with P501S transduced cells. Based on these results, a monoclonal hybridoma referred to as 10E3 was chosen for further subcloning. A number of subclones were generated, tested for specific reactivity to P501S using ELISA and typed for IgG isotype. The results of this analysis are shown below in Table V. Of the 16 subclones tested, the monoclonal antibody 10E3-G4-D3 was selected for further study.

TABLE VI
Isotype analysis of murine anti-P501S monoclonal antibodies

| Hybridoma clone | Isotype | Estimated [Ig] in supernatant (μg/ml) |
|---|---|---|
| 4D11 | IgG1 | 14.6 |
| 1G1 | IgG1 | 0.6 |
| 4F6 | IgG1 | 72 |
| 4H5 | IgG1 | 13.8 |
| 4H5-E12 | IgG1 | 10.7 |
| 4H5-EH2 | IgG1 | 9.2 |
| 4H5-H2-A10 | IgG1 | 10 |
| 4H5-H2-A3 | IgG1 | 12.8 |
| 4H5-H2-A10-G6 | IgG1 | 13.6 |
| 4H5-H2-B11 | IgG1 | 12.3 |
| 10E3 | IgG2a | 3.4 |
| 10E3-D4 | IgG2a | 3.8 |
| 10E3-D4-G3 | IgG2a | 9.5 |
| 10E3-D4-G6 | IgG2a | 10.4 |
| 10E3-E7 | IgG2a | 6.5 |
| 8H12 | IgG2a | 0.6 |

[1118] The specificity of 10E3-G4-D3 for P501S was examined by FACS analysis. Specifically, cells were fixed (2% formaldehyde, 10 minutes), perneabilized (0.1% saponin, 10 minutes) and stained with 10E3-G4-D3 at 0.5-1 μg/ml, followed by incubation with a secondary, FITC-conjugated goat anti-mouse Ig antibody (Pharmingen, San Diego, Calif.). Cells were then analyzed for FITC fluorescence using an Excalibur fluorescence activated cell sorter. For FACS analysis of transduced cells, B-LCL were retrovirally transduced with P501S. For analysis of infected cells, B-LCL were infected with a vaccinia vector that expresses P501S. To demonstrate specificity in these assays, B-LCL transduced with a different antigen (P703P) and uninfected B-LCL vectors were utilized. 10E3-G4-D3 was shown to bind with P501S-transduced B-LCL and also with P501S-infected B-LCL, but not with either uninfected cells or P703P-transduced cells.

[1119] To determine whether the epitope recognized by 10E3-G4-D3 was found on the surface or in an intracellular compartment of cells, B-LCL were transduced with P501S or HLA-B8 as a control antigen and either fixed and permeabilized as described above or directly stained with 10E3-G4-D3 and analyzed as above. Specific recognition of P501S by 10E3-G4-D3 was found to require permeabilization, suggesting that the epitope recognized by this antibody is intracellular.

[1120] The reactivity of 10E3-G4-D3 with the three prostate tumor cell lines Lncap, PC-3 and DU-145, which are known to express high, medium and very low levels of P501S, respectively, was examined by permeabilizing the cells and treating them as described above. Higher reactivity of 10E3-G4-D3 was seen with Lncap than with PC-3, which in turn showed higher reactivity that DU-145. These results are in agreement with the real time PCR and demonstrate that the antibody specifically recognizes P501S in these tumor cell lines and that the epitope recognized in prostate tumor cell lines is also intracellular.

[1121] Specificity of 10E3-G4-D3 for P501S was also demonstrated by Western blot analysis. Lysates from the prostate tumor cell lines Lncap, DU-145 and PC-3, from P501S-transiently transfected HEK293 cells, and from non-transfected HEK293 cells were generated. Western blot analysis of these lysates with 10E3-G4-D3 revealed a 46 kDa immunoreactive band in Lncap, PC-3 and P501S-transfected HEK cells, but not in DU-145 cells or non-transfected HEK293 cells. P501S mRNA expression is consistent with these results since semi-quantitative PCR analysis revealed that P501S mRNA is expressed in Lncap, to a lesser but detectable level in PC-3 and not at all in DU-145 cells. Bacterially expressed and purified recombinant P501S (referred to as P501SStr2) was recognized by 10E3-G4-D3 (24 kDa), as was full-length P501S that was transiently expressed in HEK293 cells using either the expression vector VR1023 or pCEP4. Although the predicted molecular weight of P501S is 60.5 kDa, both transfected and “native” P501S run at a slightly lower mobility due to its hydrophobic nature.

[1122] Immunohistochemical analysis was performed on prostate tumor and a panel of normal tissue sections (prostate, adrenal, breast, cervix, colon, duodenum, gall bladder, ileum, kidney, ovary, pancreas, parotid gland, skeletal muscle, spleen and testis). Tissue samples were fixed in formalin solution for 24 hours and embedded in paraffin before being sliced into 10 micron sections. Tissue sections were permeabilized and incubated with 10E3-G4-D3 antibody for 1 hr. HRP-labeled anti-mouse followed by incubation with DAB chromogen was used to visualize P501S immunoreactivity. P501S was found to be highly expressed in both normal prostate and prostate tumor tissue but was not detected in any of the other tissues tested.

[1123] To identify the epitope recognized by 10E3-G4-D3, an epitope mapping approach was pursued. A series of 13 overlapping 20-21 mers (5 amino acid overlap; SEQ ID NO: 489-501) was synthesized that spanned the fragment of P501S used to generate 10E3-G4-D3. Flat bottom 96 well microtiter plates were coated with either the peptides or the P501S fragment used to immunize mice, at 1 microgram/ml for 2 hours at 37° C. Wells were then aspirated and blocked with phosphate buffered saline containing 1% (w/v) BSA for 2 hours at room temperature, and subsequently washed in PBS containing 0.1% Tween 20 (PBST). Purified antibody 10E3-G4-D3 was added at 2 fold dilutions (1000 ng-16 ng) in PBST and incubated for 30 minutes at room temperature. This was followed by washing 6 times with PBST and subsequently incubating with HRP-conjugated donkey anti-mouse IgG (H+L)Affinipure F(ab′) fragment (Jackson Immunoresearch, West Grove, Pa.) at 1:20000 for 30 minutes. Plates were then washed and incubated for 15 minutes in tetramethyl benzidine. Reactions were stopped by the addition of 1N sulfuric acid and plates were read at 450 mn using an ELISA plate reader. As shown in FIG. 8, reactivity was seen with the peptide of SEQ ID NO: 496 (corresponding to amino acids 439-459 of P501S) and with the P501S fragment but not with the remaining peptides, demonstrating that the epitope recognized by 10E3-G4-D3 is localized to amino acids 439-459 of SEQ ID NO: 113.

[1124] In order to further evaluate the tissue specificity of P501S, multi-array immunohistochemical analysis was performed on approximately 4700 different human tissues encompassing all the major normal organs as well as neoplasias derived from these tissues. Sixty-five of these human tissue samples were of prostate origin. Tissue sections 0.6 mm in diameter were formalin-fixed and paraffin embedded. Samples were pretreated with HIER using 10 mM citrate buffer pH 6.0 and boiling for 10 min. Sections were stained with 10E3-G4-D3 and P501S immunoreactivity was visualized with HRP. All the 65 prostate tissues samples (5 normal, 55 untreated prostate tumors, 5 hormone refractory prostate tumors) were positive, showing distinct perinuclear staining. All other tissues examined were negative for P501S expression.

[1125] c) Preparation and Characterization of Antibodies against P503S

[1126] A fragment of P503S (amino acids 113-241 of SEQ ID NO: 114) was expressed and purified from bacteria essentially as described above for P501S and used to immunize both rabbits and mice. Mouse monoclonal antibodies were isolated using standard hybridoma technology as described above. Rabbit monoclonal antibodies were isolated using Selected Lymphocyte Antibody Method (SLAM) technology at Immgenics Pharmaceuticals (Vancouver, BC, Canada). Table VI, below, lists the monoclonal antibodies that were developed against P503 S.

TABLE VII

| Antibody | Species |
|---|---|
| 20D4 | Rabbit |
| JA1 | Rabbit |
| 1A4 | Mouse |
| 1C3 | Mouse |
| 1C9 | Mouse |
| 1D12 | Mouse |
| 2A11 | Mouse |
| 2H9 | Mouse |
| 4H7 | Mouse |
| 8A8 | Mouse |
| 8D10 | Mouse |
| 9C12 | Mouse |
| 6D12 | Mouse |

[1127] The DNA sequences encoding the complementarity determining regions (CDRs) for the rabbit monoclonal antibodies 20D4 and JA1 were determined and are provided in SEQ ID NO: 502 and 503, respectively.

[1128] In order to better define the epitope binding region of each of the antibodies, a series of overlapping peptides were generated that span amino acids 109-213 of SEQ ID NO: 114. These peptides were used to epitope map the anti-P503S monoclonal antibodies by ELISA as follows. The recombinant fragment of P503S that was employed as the immunogen was used as a positive control. Ninety-six well microtiter plates were coated with either peptide or recombinant antigen at 20 ng/well overnight at 4° C. Plates were aspirated and blocked with phosphate buffered saline containing 1% (w/v) BSA for 2 hours at room temperature then washed in PBS containing 0.1% Tween 20 (PBST). Purified rabbit monoclonal antibodies diluted in PBST were added to the wells and incubated for 30 min at room temperature. This was followed by washing 6 times with PBST and incubation with Protein-A HRP conjugate at a 1:2000 dilution for a further 30 min. Plates were washed six times in PBST and incubated with tetramethylbenzidine (TMB) substrate for a further 15 min. The reaction was stopped by the addition of 1N sulfuric acid and plates were read at 450 nm using at ELISA plate reader. ELISA with the mouse monoclonal antibodies was performed with supernatants from tissue culture run neat in the assay.

[1129] All of the antibodies bound to the recombinant P503S fragment, with the exception of the negative control SP2 supernatant. 20D4, JA1 and 1D12 bound strictly to peptide #2101 (SEQ ID NO: 504), which corresponds to amino acids 151-169 of SEQ ID NO: 114. 1C3 bound to peptide #2102 (SEQ ID NO: 505), which corresponds to amino acids 165-184 of SEQ ID NO: 114. 9C12 bound to peptide #2099 (SEQ ID NO: 522), which corresponds to amino acids 120-139 of SEQ ID NO: 114. The other antibodies bind to regions that were not examined in these studies.

[1130] Subsequent to epitope mapping, the antibodies were tested by FACS analysis on a cell line that stably expressed P503S to confirm that the antibodies bind to cell surface epitopes. Cells stably transfected with a control plasmid were employed as a negative control. Cells were stained live with no fixative. 0.5 ug of anti-P503S monoclonal antibody was added and cells were incubated on ice for 30 min before being washed twice and incubated with a FITC-labelled goat anti-rabbit or mouse secondary antibody for 20 min. After being washed twice, cells were analyzed with an Excalibur fluorescent activated cell sorter. The monoclonal antibodies 1C3, 1D12, 9C12, 20D4 and JA1, but not 8D3, were found to bind to a cell surface epitope of P503S.

[1131] In order to determine which tissues express P503S, immunohistochemical analysis was performed, essentially as described above, on a panel of normal tissues (prostate, adrenal, breast, cervix, colon, duodenum, gall bladder, ileum, kidney, ovary, pancreas, parotid gland, skeletal muscle, spleen and testis). HRP-labeled anti-mouse or anti-rabbit antibody followed by incubation with TMB was used to visualize P503S immunoreactivity. P503S was found to be highly expressed in prostate tissue, with lower levels of expression being observed in cervix, colon, ileum and kidney, and no expression being observed in adrenal, breast, duodenum, gall bladder, ovary, pancreas, parotid gland, skeletal muscle, spleen and testis.

[1132] Western blot analysis was used to characterize anti-P503S monoclonal antibody specificity. SDS-PAGE was performed on recombinant (rec) P503S expressed in and purified from bacteria and on lysates from HEK293 cells transfected with full length P503S. Protein was transferred to nitrocellulose and then Western blotted with each of the anti-P503S monoclonal antibodies (20D4, JA1, 1D12, 6D12 and 9C12) at an antibody concentration of 1 ug/ml. Protein was detected using horse radish peroxidase (HRP) conjugated to either a goat anti-mouse monoclonal antibody or to protein A-sepharose. The monoclonal antibody 20D4 detected the appropriate molecular weight 14 kDa recombinant P503S (amino acids 113-241) and the 23.5 kDa species in the HEK293 cell lysates transfected with full length P503S. Other anti-P503S monoclonal antibodies displayed similar specificity by Western blot.

[1133] d) Preparation and Characterization of Antibodies Against P703P

[1134] Rabbits were immunized with either a truncated (P703Ptr1; SEQ ID NO: 172) or full-length mature form (P703Pf1; SEQ ID NO: 523) of recombinant P703P protein was expressed in and purified from bacteria as described above. Affinity purified polyclonal antibody was generated using immunogen P703Pf1 or P703Ptr1 attached to a solid support. Rabbit monoclonal antibodies were isolated using SLAM technology at Immgenics Pharmaceuticals. Table VII below lists both the polyclonal and monoclonal antibodies that were generated against P703P.

TABLE VIII

| Antibody | Immunogen | Species/type |
|---|---|---|
| Aff. Purif. P703P (truncated); #2594 | P703Ptrl | Rabbit polyclonal |
| Aff. Purif. P703P (full length); #9245 | P703Pfl | Rabbit polyclonal |
| 2D4 | P703Ptrl | Rabbit monoclonal |
| 8H2 | P703Ptrl | Rabbit monoclonal |
| 7H8 | P703Ptrl | Rabbit monoclonal |

[1135] The DNA sequences encoding the complementarity determining regions (CDRs) for the rabbit monoclonal antibodies 8H2, 7H8 and 2D4 were determined and are provided in SEQ ID NO: 506-508, respectively.

[1136] Epitope mapping studies were performed as described above. Monoclonal antibodies 2D4 and 7H8 were found to specifically bind to the peptides of SEQ ID NO: 509 (corresponding to amino acids 145-159 of SEQ ID NO: 172) and SEQ ID NO: 510 (corresponding to amino acids 11-25 of SEQ ID NO: 172), respectively. The polyclonal antibody 2594 was found to bind to the peptides of SEQ ID NO: 511-514, with the polyclonal antibody 9427 binding to the peptides of SEQ ID NO: 515-517.

[1137] The specificity of the anti-P703P antibodies was determined by Western blot analysis as follows. SDS-PAGE was performed on (1) bacterially expressed recombinant antigen; (2) lysates of HEK293 cells and Ltk-/-cells either untransfected or transfected with a plasmid expressing full length P703P; and (3) supernatant isolated from these cell cultures. Protein was transferred to nitrocellulose and then Western blotted using the anti-P703P polyclonal antibody #2594 at an antibody concentration of 1 ug/ml. Protein was detected using horse radish peroxidase (HRP) conjugated to an anti-rabbit antibody. A 35 kDa immunoreactive band could be observed with recombinant P703P. Recombinant P703P runs at a slightly higher molecular weight since it is epitope tagged. In lysates and supernatants from cells transfected with full length P703P, a 30 kDa band corresponding to P703P was observed. To assure specificity, lysates from HEK293 cells stably transfected with a control plasmid were also tested and were negative for P703P expression. Other anti-P703P antibodies showed similar results.

[1138] Immunohistochemical studies were performed as described above, using anti-P703P monoclonal antibody. P703P was found to be expressed at high levels in normal prostate and prostate tumor tissue but was not detectable in all other tissues tested (breast tumor, lung tumor and normal kidney).

[1139] e) Preparation and Characterization of Antibodies against P504S

[1140] Full-length P504S (SEQ ID NO: 108) was expressed and purified from bacteria essentially as described above for P501S and employed to raise rabbit monoclonal antibodies using Selected Lymphocyte Antibody Method (SLAM) technology at Immgenics Pharmaceuticals (Vancouver, BC, Canada). The anti-P504S monoclonal antibody 13H4 was shown by Western blot to bind to both expressed recombinant P504S and to native P504S in tumor cells.

[1141] Immunohistochemical studies using 13H4 to assess P504S expression in various prostate tissues were performed as described above. A total of 104 cases, including 65 cases of radical prostatectomies with prostate cancer (PC), 26 cases of prostate biopsies and 13 cases of benign prostate hyperplasia (BPH), were stained with the anti-P504S monoclonal antibody 13H4. P504S showed strongly cytoplasmic granular staining in 64/65 (98.5%) of PCs in prostatectomies and 26/26 (100% ) of PCs in prostatic biopsies. P504S was stained strongly and diffusely in carcinomas (4+ in 91.2% of cases of PC; 3+ in 5.5%; 2+ in 2.2% and 1+ in 1.1%) and high grade prostatic intraepithelial neoplasia (4+ in all cases). The expression of P504S did not vary with Gleason score. Only 17/91 (18.7%) of cases of NP/BPH around PC and 2/13 (15.4%) of BPH cases were focally (1+, no 2+ to 4+ in all cases) and weakly positive for P504S in large glands. Expression of P504S was not found in small atrophic glands, postatrophic hyperplasia, basal cell hyperplasia and transitional cell metaplasia in either biopsies or prostatectomies. P504S was thus found to be over-expressed in all Gleason scores of prostate cancer (98.5 to 100% of sensitivity) and exhibited only focal positivities in large normal glands in 19/104 of cases (82.3% of specificity). These findings indicate that P504S may be usefully employed for the diagnosis of prostate cancer.

### Example 19

### Characterization of Cell Surface Expression and Chromosome Localization of the Prostate-Specific Antigen P501S

[1142] This example describes studies demonstrating that the prostate-specific antigen P501S is expressed on the surface of cells, together with studies to determine the probable chromosomal location of P501S.

[1143] The protein P501S (SEQ ID NO: 113) is predicted to have 11 transmembrane domains. Based on the discovery that the epitope recognized by the anti-P501S monoclonal antibody 10E3-G4-D3 (described above in Example 17) is intracellular, it was predicted that following transmembrane determinants would allow the prediction of extracellular domains of P501S. FIG. 9 is a schematic representation of the P501S protein showing the predicted location of the transmembrane domains and the intracellular epitope described in Example 17. Underlined sequence represents the predicted transmembrane domains, bold sequence represents the predicted extracellular domains, and italicized sequence represents the predicted intracellular domains. Sequence that is both bold and underlined represents sequence employed to generate polyclonal rabbit serum. The location of the transmembrane domains was predicted using HHMTOP as described by Tusnady and Simon (Principles Governing Amino Acid Composition of Integral Membrane Proteins: Applications to Topology Prediction, J Mol. Biol. 283:489-506, 1998).

[1144] Based on FIG. 9, the P501S domain flanked by the transmembrane domains corresponding to amino acids 274-295 and 323-342 is predicted to be extracellular. The peptide of SEQ ID NO: 518 corresponds to amino acids 306-320 of P501S and lies in the predicted extracellular domain. The peptide of SEQ ID NO: 519, which is identical to the peptide of SEQ ID NO: 518 with the exception of the substitution of the histidine with an asparginine, was synthesized as described above. A Cys-Gly was added to the C-terminus of the peptide to facilitate conjugation to the carrier protein. Cleavage of the peptide from the solid support was carried out using the following cleavage mixture: trifluoroacetic acid:ethanediol:thioanisol:water:phenol (40:1:2:2:3). After cleaving for two hours, the peptide was precipitated in cold ether. The peptide pellet was then dissolved in 10% v/v acetic acid and lyophilized prior to purification by C18 reverse phase hplc. A gradient of 5-60% acetonitrile (containing 0.05% TFA) in water (containing 0.05% TFA) was used to elute the peptide. The purity of the peptide was verified by hplc and mass spectrometry, and was determined to be >95%. The purified peptide was used to generate rabbit polyclonal antisera as described above.

[1145] Surface expression of P501S was examined by FACS analysis. Cells were stained with the polyclonal anti-P501S peptide serum at 10 μg/ml, washed, incubated with a secondary FITC-conjugated goat anti-rabbit Ig antibody (ICN), washed and analyzed for FITC fluorescence using an Excalibur fluorescence activated cell sorter. For FACS analysis of transduced cells, B-LCL were retrovirally transduced with P501S. To demonstrate specificity in these assays, B-LCL transduced with an irrelevant antigen (P703P) or nontransduced were stained in parallel. For FACS analysis of prostate tumor cell lines, Lncap, PC-3 and DU-145 were utilized. Prostate tumor cell lines were dissociated from tissue culture plates using cell dissociation medium and stained as above. All samples were treated with propidium iodide (PI) prior to FACS analysis, and data was obtained from PI-excluding (i.e., intact and non-permeabilized) cells. The rabbit polyclonal serum generated against the peptide of SEQ ID NO: 519 was shown to specifically recognize the surface of cells transduced to express P501S, demonstrating that the epitope recognized by the polyclonal serum is extracellular.

[1146] To determine biochemically if P501S is expressed on the cell surface, peripheral membranes from Lncap cells were isolated and subjected to Western blot analysis. Specifically, Lncap cells were lysed using a dounce homogenizer in 5 ml of homogenization buffer (250 mM sucrose, 10 mM HEPES, 1 mM EDTA, pH 8.0, 1 complete protease inhibitor tablet (Boehringer Mannheim)). Lysate samples were spun at 1000 g for 5 min at 4° C. The supernatant was then spun at 8000 g for 10 min at 4 ° C. Supernatant from the 8000 g spin was recovered and subjected to a 100,000 g spin for 30 min at 4° C. to recover peripheral membrane. Samples were then separated by SDS-PAGE and Western blotted with the mouse monoclonal antibody 10E3-G4-D3 (described above in Example 17) using conditions described above. Recombinant purified P501S, as well as HEK293 cells transfected with and over-expressing P501S were included as positive controls for P501S detection. LCL cell lysate was included as a negative control. P501S could be detected in Lncap total cell lysate, the 8000 g (internal membrane) fraction and also in the 100,000 g (plasma membrane) fraction. These results indicate that P501S is expressed at, and localizes to, the peripheral membrane.

[1147] To demonstrate that the rabbit polyclonal antiserum generated to the peptide of SEQ ID NO: 519 specifically recognizes this peptide as well as the corresponding native peptide of SEQ ID NO: 518, ELISA analyses were performed. For these analyses, flat-bottomed 96 well microtiter plates were coated with either the peptide of SEQ ID NO: 519, the longer peptide of SEQ ID NO: 520 that spans the entire predicted extracellular domain, the peptide of SEQ ID NO: 521 which represents the epitope recognized by the P501S-specific antibody 10E3-G4-D3, or a P501S fragment (corresponding to amino acids 355-526 of SEQ ID NO: 113) that does not include the immunizing peptide sequence, at 1 μg/ml for 2 hours at 37° C. Wells were aspirated, blocked with phosphate buffered saline containing 1% (w/v) BSA for 2 hours at room temperature and subsequently washed in PBS containing 0.1% Tween 20 (PBST). Purified anti-P501S polyclonal rabbit serum was added at 2 fold dilutions (1000 ng-125 ng) in PBST and incubated for 30 min at room temperature. This was followed by washing 6 times with PBST and incubating with HRP-conjugated goat anti-rabbit IgG (H+L) Affinipure F(ab′) fragment at 1:20000 for 30 min. Plates were then washed and incubated for 15 min in tetramethyl benzidine. Reactions were stopped by the addition of 1N sulfuric acid and plates were read at 450 nm using an ELISA plate reader. As shown in FIG. 11, the anti-P501S polyclonal rabbit serum specifically recognized the peptide of SEQ ID NO: 519 used in the immunization as well as the longer peptide of SEQ ID NO: 520, but did not recognize the irrelevant P501S-derived peptides and fragments.

[1148] In further studies, rabbits were immunized with peptides derived from the P501S sequence and predicted to be either extracellular or intracellular, as shown in FIG. 9. Polyclonal rabbit sera were isolated and polyclonal antibodies in the serum were purified, as described above. To determine specific reactivity with P501S, FACS analysis was employed, utilizing either B-LCL transduced with P501S or the irrelevant antigen P703P, of B-LCL infected with vaccinia virus-expressing P501S. For surface expression, dead and non-intact cells were excluded from the analysis as described above. For intracellular staining, cells were fixed and permeabilized as described above. Rabbit polyclonal serum generated against the peptide of SEQ ID NO: 548, which corresponds to amino acids 181-198 of P501S, was found to recognize a surface epitope of P501S. Rabbit polyclonal serum generated against the peptide SEQ ID NO: 551, which corresponds to amino acids 543-553 of P501S, was found to recognize an epitope that was either potentially extracellular or intracellular since in different experiments intact or permeabilized cells were recognized by the polyclonal sera. Based on similar deductive reasoning, the sequences of SEQ ID NO: 541-547, 549 and 550, which correspond to amino acids 109-122, 539-553, 509-520, 37-54, 342-359, 295-323, 217-274, 143-160 and 75-88, respectively, of P501S, can be considered to be potential surface epitopes of P501S recognized by antibodies.

[1149] In further studies, mouse monoclonal antibodies were raised against amino acids 296 to 322 to P501S, which are predicted to be in an extracellular domain. A/J mice were immunized with P501S/adenovirus, followed by subsequent boosts with an E. coli recombinant protein, referred to as P501N, that contains amino acids 296 to 322 of P501S, and with peptide 296-322 (SEQ ID NO: 898) coupled with KLH. The mice were subsequently used for splenic B cell fusions to generate anti-peptide hybridomas. The resulting 3 clones, referred to as 4F4 (IgG1,kappa), 4G5 (IgG2a,kappa) and 9B9 (IgG1,kappa), were grown for antibody production. The 4G5 mAb was purified by passing the supernatant over a Protein A-sepharose column, followed by antibody elution using 0.2M glycine, pH 2.3. Purified antibody was neutralized by the addition of 1MTris, pH 8, and buffer exchanged into PBS.

[1150] For ELISA analysis, 96 well plates were coated with P501S peptide 296-322 (referred to as P501-long), an irrelevant P775 peptide, P501S-N, P501TR2, P501S-long-KLH, P501S peptide 306-319 (referred to as P501-short)-KLH, or the irrelevant peptide 2073-KLH, all at a concentration of 2 ug/ml and allowed to incubate for 60 minutes at 37° C. After coating, plates were washed 5× with PBS + 0.1% Tween and then blocked with PBS, 0.5% BSA, 0.4% Tween20 for 2 hours at room temperature. Following the addition of supernatants or purified mAb, the plates were incubated for 60 minutes at room temperature. Plates were washed as above and donkey anti-mouse IgHRP-linked secondary antibody was added and incubated for 30 minutes at room temperature, followed by a final washing as above. TMB peroxidase substrate was added and incubated 15 minutes at room temperature in the dark. The reaction was stopped by the addition of 1N H₂SO₄ and the OD was read at 450 nM. All three hybrid clones secreted mAb that recognized peptide 296-322 and the recombinant protein P501N.

[1151] For FACS analysis, HEK293 cells were transiently transfected with a P501S/VR1012 expression constructs using Fugene 6 reagent. After 2 days of culture, cells were harvested and washed, then incubated with purified 4G5 mAb for 30 minutes on ice. After several washes in PBS, 0.5% BSA, 0.01% azide, goat anti-mouse Ig-FITC was added to the cells and incubated for 30 minutes on ice. Cells were washed and resuspended in wash buffer including 1% propidium iodide and subjected to FACS analysis. The FACS analysis confirmed that amino acids 296-322 of P501S are in an extracellular domain and are cell surface expressed.

[1152] The chromosomal location of P501S was determined using the GeneBridge 4 Radiation Hybrid panel (Research Genetics). The PCR primers of SEQ ID NO: 528 and 529 were employed in PCR with DNA pools from the hybrid panel according to the manufacturer's directions. After 38 cycles of amplification, the reaction products were separated on a 1.2% agarose gel, and the results were analyzed through the Whitehead Institute/MIT Center for Genome Research web server (http://www-genome.wi.mit.edu/cgi-bin/contig/rhmapper.pl) to determine the probable chromosomal location. Using this approach, P501S was mapped to the long arm of chromosome 1 at WI-9641 between q32 and q42. This region of chromosome 1 has been linked to prostate cancer susceptibility in hereditary prostate cancer (Smith et al. Science 274:1371-1374, 1996 and Berthon et al. Am. J Hum. Genet. 62:1416-1424, 1998). These results suggest that P501S may play a role in prostate cancer malignancy.

### Example 20

### Regulation of Expression of the Prostate-Specific Antigen P501S

[1153] Steroid (androgen) hormone modulation is a common treatment modality in prostate cancer. The expression of a number of prostate tissue-specific antigens have previously been demonstrated to respond to androgen. The responsiveness of the prostate-specific antigen P501S to androgen treatment was examined in a tissue culture system as follows.

[1154] Cells from the prostate tumor cell line LNCaP were plated at 1.5×10⁶ cells/T75 flask (for RNA isolation) or 3×10⁵ cells/well of a 6-well plate (for FACS analysis) and grown overnight in RPMI 1640 media containing 10% charcoal-stripped fetal calf serum (BRL Life Technologies, Gaithersburg, Md.). Cell culture was continued for an additional 72 hours in RPMI 1640 media containing 10% charcoal-stripped fetal calf serum, with 1 nM of the synthetic androgen Methyltrienolone (R1881; New England Nuclear) added at various time points. Cells were then harvested for RNA isolation and FACS analysis at 0, 1, 2, 4, 8, 16, 24, 28 and 72-hours post androgen addition. FACS analysis was performed using the anti-P501S antibody 10E3-G4-D3 and permeabilized cells.

[1155] For Northern analysis, 5-10 micrograms of total RNA was run on a formaldehyde denaturing gel, transferred to Hybond-N nylon membrane (Amersham Pharmacia Biotech, Piscataway, N.J.), cross-linked and stained with methylene blue. The filter was then prehybridized with Church's Buffer (250 mM Na₂HPO₄, 70 mM H₃PO₄, 1 mM EDTA, 1% SDS, 1% BSA in pH 7.2) at 65° C. for 1 hour. P501S DNA was labeled with 32P using High Prime random-primed DNA labeling kit (Boehringer Mannheim). Unincorporated label was removed using MicroSpin S300-HR columns (Amersham Pharmacia Biotech). The RNA filter was then hybridized with fresh Church's Buffer containing labeled cDNA overnight, washed with 1×SCP (0.1 M NaCl, 0.03 M Na₂HPO₄.7H₂O, 0.001 M Na₂EDTA), 1% sarkosyl (n-lauroylsarcosine) and exposed to X-ray film.

[1156] Using both FACS and Northern analysis, P501S message and protein levels were found in increase in response to androgen treatment.

### Example 21

### Preparation of Fusion Proteins of Prostate-Specific Antigens

[1157] The example describes the preparation of a fusion protein of the prostate-specific antigen P703P and a truncated form of the known prostate antigen PSA. The truncated form of PSA has a 21 amino acid deletion around the active serine site. The expression construct for the fusion protein also has a restriction site at 3′ end, immediately prior to the termination codon, to aid in adding cDNA for additional antigens.

[1158] The full-length cDNA for PSA was obtained by RT-PCR from a pool of RNA from human prostate tumor tissues using the primers of SEQ ID NO: 607 and 608, and cloned in the vector pCR-Blunt II-TOPO. The resulting cDNA was employed as a template to make two different fragments of PSA by PCR with two sets of primers (SEQ ID NO: 609 and 610; and SEQ ID NO: 611 and 612). The PCR products having the expected size were used as templates to make truncated forms of PSA by PCR with the primers of SEQ ID NO: 611 and 613, which generated PSA (delta 208-218 in amino acids). The cDNA for the mature form of P703P with a 6× histidine tag at the 5′ end, was prepared by PCR with P703P and the primers of SEQ ID NO: 614 and 615. The cDNA for the fusion of P703P with the truncated form of PSA (referred to as FOPP) was then obtained by PCR using the modified P703P cDNA and the truncated form of PSA cDNA as templates and the primers of SEQ ID NO: 614 and 615. The FOPP cDNA was cloned into the NdeI site and XhoI site of the expression vector pCRX1, and confirmed by DNA sequencing. The determined cDNA sequence for the fusion construct FOPP is provided in SEQ ID NO: 616, with the amino acid sequence being provided in SEQ ID NO: 617.

[1159] The fusion FOPP was expressed as a single recombinant protein in E. Coli as follows. The expression plasmid pCRX1FOPP was transformed into the E. Coli strain BL21-CodonPlus RIL. The transformant was shown to express FOPP protein upon induction with 1 mM IPTG. The culture of the corresponding expression clone was inoculated into 25 ml LB broth containing 50 ug/ml kanamycin and 34 ug/ml chloramphenicol, grown at 37° C. to OD600 of about 1, and stored at 4° C overnight. The culture was diluted into 1 liter of TB LB containing 50 ug/ml kanamycin and 34 ug/ml chloramphenicol, and grown at 37° C. to OD600 of 0.4. IPTG was added to a final concentration of 1 mM, and the culture was incubated at 30° C. for 3 hours. The cells were pelleted by centrifugation at 5,000 RPM for 8 min. To purify the protein, the cell pellet was suspended in 25 ml of 10 mM Tris-Cl pH 8.0, 2mM PMSF, complete protease inhibitor and 15 ug lysozyme. The cells were lysed at 4° C. for 30 minutes, sonicated several times and the lysate centrifuged for 30 minutes at 10,000×g. The precipitate, which contained the inclusion body, was washed twice with 10 mM Tris-Cl pH 8.0 and 1% CHAPS. The inclusion body was dissolved in 40 ml of 10 mM Tris-Cl pH 8.0, 100 mM sodium phosphate and 8 M urea. The solution was bound to 8 ml Ni-NTA (Qiagen) for one hour at room temperature. The mixture was poured into a 25 ml column and washed with 50 ml of 10 mM Tris-Cl pH 6.3, 100 mM sodium phosphate, 0.5% DOC and 8M urea. The bound protein was eluted with 350 mM imidazole, 10 mM Tris-Cl pH 8.0, 100 mM sodium phosphate and 8 M urea. The fractions containing FOPP proteins were combined and dialyzed extensively against 10 mM Tris-Cl pH 4.6, aliquoted and stored at −70° C.

### Example 22

### Real-Time PCR Characterization of the Prostate-Specific Antigen P501S in Peripheral Blood of Prostate Cancer Patients

[1160] Circulating epithelial cells were isolated from fresh blood of normal individuals and metastatic prostate cancer patients, mRNA isolated and cDNA prepared using real-time PCR procedures. Real-time PCR was performed with the Taqman™ procedure using both gene specific primers and probes to determine the levels of gene expression.

[1161] Epithelial cells were enriched from blood samples using an immunomagnetic bead separation method (Dynal A. S., Oslo, Norway). Isolated cells were lysed and the magnetic beads removed. The lysate was then processed for poly A+ mRNA isolation using magnetic beads coated with Oligo(dT)25. After washing the beads in buffer, bead/poly A+ RNA samples were suspended in 10 mM Tris HCl pH 8.0 and subjected to reversed transcription. The resulting cDNA was subjected to real-time PCR using gene specific primers. Beta-actin content was also determined and used for normalization. Samples with P501S copies greater than the mean of the normal samples+3 standard deviations were considered positive. Real time PCR on blood samples was performed using the Taqman™ procedure but extending to 50 cycles using forward and reverse primers and probes specific for P501S. Of the eight samples tested, 6 were positive for P501S and β-actin signal. The remaining 2 samples had no detectable β-actin or P501S. No P501S signal was observed in the four normal blood samples tested.

### Example 23

### Expression of the Prostate-Specific Antigens P703P and P501S in SCID Mouse-Passaged Prostate Tumors

[1162] When considering the effectiveness of antigens in the treatment of prostate cancer, the continued presence of the antigens in tumors during androgen ablation therapy is important. The presence of the prostate-specific antigens P703P and P501S in prostate tumor samples grown in SCID mice in the presence of testosterone was evaluated as follows.

[1163] Two prostate tumors that had metastasized to the bone were removed from patients, implanted into SCID mice and grown in the presence of testosterone. Tumors were evaluated for mRNA expression of P703P, P501S and PSA using quantitative real time PCR with the SYBR green assay method. Expression of P703P and P501S in a prostate tumor was used as a positive control and the absence in normal intestine and normal heart as negative controls. In both cases, the specific mRNA was present in late passage tumors. Since the bone metastases were grown in the presence of testosterone, this implies that the presence of these genes would not be lost during androgen ablation therapy.

### Example 24

### Identification of P501S and P703P-Specific Antibodies in Prostate Cancer Patients

[1164] Antibody responses specific for the prostate antigens P501S or P703P in sera of prostate cancer patients and normal healthy donors were examined as follows.

[1165] Both Western blot analysis and ELISA analysis of sera were performed using P501S peptides (SEQ ID NO: 985-987) and P703P peptides (SEQ ID NO: 988-990). SEQ ID NO: 985, 986 and 987 represent amino acids 231-250, 246-266 and 492-521, respectively, of P501S. SEQ ID NO: 988, 989 and 990 represent amino acids 110-124, 140-154 and 190-204, respectively, of P703P. The results demonstrated that some of the prostate cancer patients had antibodies that recognize the same peptides (i.e. common epitopes) of either P501S or P703P and that these common epitopes were either not recognized or recognized at significantly lower levels by sera from normal donors. The data showed that at least 14 out of 48 prostate cancer patients possessed P501S-specific antibodies, and that 3 out of 48 prostate cancer patients possessed P703P-specific antibodies with none of the patients having both antibodies specific for P501S and antibodies specific for P703P.

### Example 25

### Anti-P503S Monoclonal Antibody Inhibits Tumor Growth in Vivo

[1166] The ability of the anti-P503S monoclonal antibody 20D4 to suppress tumor formation in mice was examined as follows.

[1167] Ten SCID mice were injected subcutaneously with HEK293 cells that expressed P503S. Five mice received 150 micrograms of 20D4 intravenously at day 0 (time of tumor cell injection), day 5 and day 9. Tumor size was measured for 50 days. Of the five animals that received no 20D4, three formed detectable tumors after about 2 weeks which continued to enlarge throughout the study. In contrast, none of the five mice that received 20D4 formed tumors. These results demonstrate that the anti-P503S Mab 20D4 displays potent anti-tumor activity in vivo.

### Example 26

### Characterization of a T Cell Recepter Clone from a P501S-Specific T Cell Clone

[1168] T cells have a limited lifespan. However, cloning of T cell receptor (TCR) chains and subsequent transfer essentially enables infinite propagation of the T cell specificity. Cloning of tumor-antigen TCR chains allows the transfer of the specificity into T cells isolated from patients that share the TCR MHC-restricting allele. Such T cells could then be expanded and used in adoptive transfer settings to introduce the tumor antigen specificity into patients carrying tumors that express the antigen. T cell receptor alpha and beta chains from a CD8 T cell clone specific for the prostate-specific antigen P501S were isolated and sequenced as follows.

[1169] Total mRNA from 2×10⁶ cells from CTL clone 4E5 (described above in Example 12) was isolated using Trizol reagent and cDNA was synthesized. To determine Va and Vb sequences in this clone, a panel of Va and Vb subtype-specific primers was synthesized and used in RT-PCR reactions with cDNA generated from each of the clones. The RT-PCR reactions demonstrated that each of the clones expressed a common Vb sequence that corresponded to the Vb7 subfamily. Futhermore, using cDNA generated from the clone, the Va sequence expressed was determined to be Va6. To clone the full TCR alpha and beta chains from clone 4E5, primers were designed that spanned the initiator and terminator-coding TCR nucleotides. The primers were as follows: TCR Valpha-6 5′ (sense): GGATCC - - - GCCGCCACC-ATGTCACTTTCTAGCCTGCT (SEQ ID NO: 899) BamHI site Kozak TCR alpha sequence TCR alpha 3′ (antisense): GTCGAC - - - TCAGCTGGACCACAGCCGCAG (SEQ ID NO: 900) SalI site TCR alpha constant sequence TCR Vbeta-7. 5′ (sense): GGATCC - - - GCCGCCACC - - - ATGGGCTGCAGGCTGCTCT (SEQ ID NO: 901) BamHI site Kozak TCR alpha sequence TCR beta 3′ (antisense): GTCGAC - - - TCAGAAATCCTTTCTCTTGAC (SEQ ID NO: 902) SalI site TCR beta constant sequence. Standard 35 cycle RT-PCR reactions were established using cDNA synthesized from the CTL clone and the above primers, employing the proofreading thermostable polymerase PWO (Roche, Nutley, N.J.).

[1170] The resultant specific bands (approx. 850 bp for alpha and approx. 950 for beta) were ligated into the PCR blunt vector (Invitrogen) and transformed into E. coli. E coli transformed with plasmids containing full-length alpha and beta chains were identified, and large scale preparations of the corresponding plasmids were generated. Plasmids containing full-length TCR alpha and beta chains were submitted for sequencing. The sequencing reactions demonstrated the cloning of full-length TCR alpha and beta chains with the determined cDNA sequences for the Vb and Va chains being shown in SEQ ID NO: 903 and 904, respectively. The corresponding amino acid sequences are shown in SEQ ID NO: 905 and 906, respectively. The Va sequence was shown by nucleotide sequence alignment to be 99% identical (347/348) to Va6.2, and the Vb to be 99% identical to Vb7 (336/338).

### Example 27

### Capture of Prostate Specific Cells using the Prostate Antigen P503S

[1171] As described above, P503S is found on the surface of prostate cells. Secondary coated microsphere beads specific for mouse IgG were coupled with the purified P503S-specific monoclonal antibody 1D12. The bound P503S antibody was then used to capture HEK cells expressing recombinant P503S. This provides a model system for prostate-specific cell capture which may be usefully employed in the detection of prostate cells in blood, and therefore in the detection of prostate cancer.

[1172] P503S-transfected HEK cells were harvested and redissolved in wash buffer (PBS, 0.1% BSA, 0.6% sodium citrate) at an appropriate volume to give at least 5⁴ cells per sample. Round bottom Eppendorf tubes were used for all procedures involving beads. The stock concentrations were as shown below in Table IX.

TABLE IX

| Stock concentrations | Sample concentration | Amount needed |
|---|---|---|
| Epithelial enrich beads 4⁸ | 1⁷ beads/ml | 125 ul stock |
| beads/ml (Dynal Biotech | | per 5 ml |
| Inc. Lake Success, NY) | | volume |
| 1D12 ascites antibody 2 | 0.1 ug/ml (0.1X) to 5 ug/ml | 0.05 ul to |
| mg/ml | (5X) titrations | 2.5 ul stock |
| | | per sample |
| α- Mamma Mu 0.9 mg/ml | 1 ug/ml (1X) | 1.1 ul stock |
| | | per sample |
| Pan-mouse IgG beads 4⁸ | 1⁷ beads/ml | 125 ul stock |
| beads/ml (Dynal Biotech) | | per 5 ml |
| | | volume |

[1173] Blocked immunomagnetic beads were pre-washed as follows: all beads needed were pooled and washed once with 1 ml wash buffer. The beads were resuspended din a 3× volume of 1% BSA (v/v) in wash buffer and incubated for 15 min rotating at 4° C. The beads were then washed three times with 2× volume of wash buffer and resuspended to original volume. Non-blocked beads were pooled, washed three times with 2× volume of wash buffer and resuspended to original volume.

[1174] Primary antibody was incubated with secondary beads in a fresh Eppendorf for 30 minutes, rotating at 4° C. Approximately 200 ul wash buffer was added to increase the total volume for even mixing of the sample. The antibody-bead solution was transferred to a fresh Eppendorf, washed twice with an equal volume of wash buffer and resuspended to original volume. Target cells were added to each sample and incubated for 45 minutes, rotating at 4° C. The tubes were transferred to a magnet, the supernatant removed, taking care not the agitate the beads, and the samples were washed twice with 1 ml wash buffer. The samples were then ready for RT-PCR using a Dynabeads mRNA direct microkit (Dynal Biotech).

[1175] Epithelial cell enrichment was placed in a magnet and supernant was removed. The epithelial enrichment beads were then resuspendedin 100 ul lysis/binding buffer fortified with Rnasin (2 U/ul per sample), and sotred at −70° C. until use. Oligo (dT₂₅) Dynabeads were pre-washed as follows: all beads needed were pooled (23 ul/sample), washed three times with an excess volume of lysis/binding buffer, and resuspsended ot original volume. The lysis supernant was separated with a magnet and transferred to a fresh Eppendorf. 20 ul oligo(dT25) Dynabeads were added per samplem ad rolled for 5 min at room temperature. Supernant was separated using a magnet and discarded, leaving the mRNA annealed ot the beads. The bead/mRNA complex was washed with buffer and resuspended in cold Tris-HCl.

[1176] For RT-PCR, the Tris-HCl supernatant was separated and discarded using MPS. For each sample containing 1⁵ cells or less, the following was added to give a total volume of 30 ul: 14.25 ul H₂O; 1.5 ul BSA; 6 ul first strand buffer; 0.75 mL 10 mM dNTP mix; 3 ul Rnasin; 3 ul 0.1M dTT; and 1.5 ul Superscript II. The resulting solution was incubated for 1 hour at 42° C., diluted 1:5 in H2O, heated at 80° C. for 2 min to detach cDNA from the beads, and immediately placed on MPS. The supernatant containing cDNA was transferred to a new tube and stored at −20° C.

[1177] Table X shows the percentage of capture of P503S-transfected HEK cells as determined by RT-PCR.

TABLE X

| | % capture P503S-transfected | % capture |
|---|---|---|
| | HEK cells | LnCAP cells |
| 0.1 ug/ml P503S Mab | 36.90 | 0.00 |
| 0.5 ug/ml P503S Mab | 67.40 | 2.93 |
| 1 ug/ml P503S Mab | 40.22 | 0.00 |
| 5 ug/ml P503S Mab | 13.11 | 0.00 |
| Anti-Mu beads only, non- | 1.42 | 0.00 |
| blocked | | |
| Anti-Mu beads only, | 15.65 | 20.21 |
| blocked | | |
| Absolute control, non- | 100.00 | 100.00 |
| capture cells | | |

### Example 28

### Immunization of Mice with Recombinant P703P

[1178] In vivo immunogenicity studies were performed using a variety of P703P recombinant protein formulations. Specifically, groups of mice were immunized with the P703P formulations shown below in Table XI, wherein “C′amidated P703P” represents P703P amidated at the C terminal; “truncated-P703P” represents a truncated form of P703P, and “FOPP” represents a fusion of P703P and PSA.

TABLE XI

| GROUP | ANTIGEN | DOSE | | SOURCE | ADJUVANT | ROUTE |
|---|---|---|---|---|---|---|
| 1 | C′amidated P703P | 20 | μg | E. coli | AS1 | Im, sq (fp) |
| 2 | Truncated P703P | 20 | μg | E. coli | AS1 | Im, sq (fp) |
| 3 | C′amidated P703P | 20 | μg | Pichia | AS1 | Im, sq (fp) |
| 4 | P703P | 20 | μg | Pichia | AS1 | Im, sq (fp) |
| 5 | FOPP | 20 | μg | E. coli | AS1 | Im, sq (fp) |
| 6 | P703P | 107 | pfu | | none | Sq base of |
| | | | | | | tail |
| 7 | C′amidated P703P | 20 | μg | E. coli | MPL-SE | Im, sq (fp) |
| 8 | Truncated P703P | 20 | μg | E. coli | MPL-SE | Im, sq (fp) |
| 9 | C′amidated P703P | 20 | μg | Pichia | MPL-SE | Im, sq (fp) |
| 10 | P703P | 20 | μg | Pichia | MPL-SE | Im, sq (fp) |
| 11 | FOPP | 20 | μg | E. coli | MPL-SE | Im, sq (fp) |
| 12 | Naive (control) | | | | | |

[1179] Each protein immunization was done in four sites: subcutaneously (sq) in both footpads and intramuscularly (im) in the leg. Each immunization was done 3 weeks apart, with sera plus spleen and lymph node (LN) cells being harvested 10 days following the last immunization.

[1180] T cell proliferation and interferon-gamma assays were performed as follows. 250,000 spleen or 100,000 LN cells were plated in 96 well plates and stimulated with 1-10 ug/ml of antigen. Antigens tested include the five proteins listed above, P703P expressed in baculovirus, NS1 control protein, PSA (for FOPP groups only), and P703P peptide pools. Peptide pools consisted of 20-mer peptides overlapping by 15 amino acids with each pool containing 6-8 peptides. Con A was used as a positive control. Cultures were pulsed with H3-thymidine on day 4 after initiation of culture for assaying proliferation. For assaying IFNγ levels by ELISA, supernatants were also pulled on day 4. In addition, sera were pooled and assayed by ELISA for IgG antibodies against the recombinant proteins listed above.

[1181] All immunogens elicited strong antibody responses to the immunogen. In all cases these responses reacted with other sources of P703P protein, including strong reactivity with both Pichia forms and baculovirus forms of P703P. AS1 adjuvant elicited stronger antibody responses than MPL-SE. The best imnunogen in terms of eliciting a response against Pichia and baculovirus forms of P703P was FOPP, but all of the immunogens elicited strong reactive P703P antibody responses against the E. Coli derived P703P. In both the proliferation and interferon-gamma assays, all immunogens elicited fairly good T cell response to the immunogen, with most animals with detectable responses to their immunogen also responding to other sources of P703P protein. Again, AS1 adjuvant elicited better T cell responses than MPL-SE.

[1182] From the foregoing it will be appreciated that, although specific embodiments of the invention have been described herein for purposes of illustration, various modifications may be made without deviating from the spirit and scope of the invention. Accordingly, the invention is not limited except as by the appended claims.

The application's sequence listing, which the Patent Office published only in electronic form, follows.

SEQUENCE LISTING (990 sequences)

SEQ ID NO: 1 - DNA, 814 bp, Homo sapien
  misc_feature (1)...(814): n = A,T,C or G
tttttttttttttttcacagtataacagctctttatttctgtgagttctactaggaaatcatcaaatctgagggttgtctggaggacttcaatacacctccccccatagtgaatcagcttccagggggtccagtccctctccttacttcatccccatcccatgccaaaggaagaccctccctccttggctcacagccttctctaggcttcccagtgcctccaggacagagtgggttatgttttcagctccatccttgctgtgagtgtctggtgcgttgtgcctccagcttctgctcagtgcttcatggacagtgtccagcacatgtcactctccactctctcagtgtggatccactagttctagagcggccgccaccgcggtggagctccagcttttgttccctttagtgagggttaattgcgcgcttggcgtaatcatggtcataactgtttcctgtgtgaaattgttatccgctcacaattccacacaacatacgagccggaagcataaagtgtaaagcctggggtgcctaatgagtganctaactcacattaattgcgttgcgctcactgnccgctttccagtcnggaaaactgtcgtgccagctgcattaatgaatcggccaacgcncggggaaaagcggtttgcgttttgggggctcttccgcttctcgctcactnantcctgcgctcggtcnttcggctgcggggaacggtatcactcctcaaaggnggtattacggttatccnnaaatcnggggatacccnggaaaaaantttaacaaaagggcancaaagggcngaaacgtaaaaa

SEQ ID NO: 2 - DNA, 816 bp, Homo sapien
  misc_feature (1)...(816): n = A,T,C or G
acagaaatgttggatggtggagcacctttctatacgacttacaggacagcagatggggaattcatggctgttggagcaatagaaccccagttctacgagctgctgatcaaaggacttggactaaagtctgatgaacttcccaatcagatgagcatggatgattggccagaaatgaagaagaagtttgcagatgtatttgcaaagaagacgaaggcagagtggtgtcaaatctttgacggcacagatgcctgtgtgactccggttctgacttttgaggaggttgttcatcatgatcacaacaaggaacggggctcgtttatcaccagtgaggagcaggacgtgagcccccgccctgcacctctgctgttaaacaccccagccatcccttctttcaaaagggatccactagttctagaagcggccgccaccgcggtggagctccagcttttgttccctttagtgagggttaattgcgcgcttggcgtaatcatggtcatagctgtttcctgtgtgaaattgttatccgctcacaattcccccaacatacgagccggaacataaagtgttaagcctggggtgcctaatgantgagctaactcncattaattgcgttgcgctcactgcccgctttccagtcgggaaaactgtcgtgccactgcnttantgaatcngccaccccccgggaaaaggcggttgcnttttgggcctcttccgctttcctcgctcattgatcctngcncccggtcttcggctgcggngaacggttcactcctcaaaggcggtntnccggttatccccaaacnggggatacccnga

SEQ ID NO: 3 - DNA, 773 bp, Homo sapien
  misc_feature (1)...(773): n = A,T,C or G
cttttgaaagaagggatggctggggtgtttaacagcagaggtgcagggcgggggctcacgtcctgctcctcactggtgataaacgagccccgttccttgttgtgatcatgatgaacaacctcctcaaaagtcagaaccggagtcacacaggcatctgtgccgtcaaagatttgacaccactctgccttcgtcttctttgcaaatacatctgcaaacttcttcttcatttctggccaatcatccatgctcatctgattgggaagttcatcagactttagtccanntcctttgatcagcagctcgtagaactggggttctattgctccaacagccatgaattccccatctgctgtcctgtaagtcgtatagaaaggtgctccaccatccaacatgttctgtcctcgagggggggcccggtacccaattcgccctatantgagtcgtattacgcgcgctcactggccgtcgttttacaacgtcgtgactgggaaaaccctgggcgttaccaacttaatcgccttgcagcacatccccctttcgccagctgggcgtaatancgaaaaggcccgcaccgatcgcccttccaacagttgcgcacctgaatgggnaaatgggacccccctgttaccgcgcattnaacccccgcngggtttngttgttacccccacntnnaccgcttacactttgccagcgccttancgcccgctccctttcncctttcttcccttcctttcncnccnctttcccccggggtttcccccntcaaaccccna

SEQ ID NO: 4 - DNA, 828 bp, Homo sapien
  misc_feature (1)...(828): n = A,T,C or G
cctcctgagtcctactgacctgtgctttctggtgtggagtccagggctgctaggaaaaggaatgggcagacacaggtgtatgccaatgtttctgaaatgggtataatttcgtcctctccttcggaacactggctgtctctgaagacttctcgctcagtttcagtgaggacacacacaaagacgtgggtgaccatgttgtttgtggggtgcagagatgggaggggtggggcccaccctggaagagtggacagtgacacaaggtggacactctctacagatcactgaggataagctggagccacaatgcatgaggcacacacacagcaaggatgacnctgtaaacatagcccacgctgtcctgngggcactgggaagcctanatnaggccgtgagcanaaagaaggggaggatccactagttctanagcggccgccaccgcggtgganctccancttttgttccctttagtgagggttaattgcgcgcttggcntaatcatggtcatanctntttcctgtgtgaaattgttatccgctcacaattccacacaacatacganccggaaacataaantgtaaacctggggtgcctaatgantgactaactcacattaattgcgttgcgctcactgcccgctttccaatcnggaaacctgtcttgccncttgcattnatgaatcngccaacccccggggaaaagcgtttgcgttttgggcgctcttccgcttcctcnctcanttantccctncnctcggtcattccggctgcngcaaaccggttcaccncctccaaagggggtattccggtttccccnaatccgggganancc

SEQ ID NO: 5 - DNA, 834 bp, Homo sapien
  misc_feature (1)...(834): n = A,T,C or G
tttttttttttttttactgatagatggaatttattaagcttttcacatgtgatagcacatagttttaattgcatccaaagtactaacaaaaactctagcaatcaagaatggcagcatgttattttataacaatcaacacctgtggcttttaaaatttggttttcataagataatttatactgaagtaaatctagccatgcttttaaaaaatgctttaggtcactccaagcttggcagttaacatttggcataaacaataataaaacaatcacaatttaataaataacaaatacaacattgtaggccataatcatatacagtataaggaaaaggtggtagtgttgagtaagcagttattagaatagaataccttggcctctatgcaaatatgtctagacactttgattcactcagccctgacattcagttttcaaagtaggagacaggttctacagtatcattttacagtttccaacacattgaaaacaagtagaaaatgatgagttgatttttattaatgcattacatcctcaagagttatcaccaacccctcagttataaaaaattttcaagttatattagtcatataacttggtgtgcttattttaaattagtgctaaatggattaagtgaagacaacaatggtcccctaatgtgattgatattggtcatttttaccagcttctaaatctnaactttcaggcttttgaactggaacattgnatnacagtgttccanagttncaacctactggaacattacagtgtgcttgattcaaaatgttattttgttaaaaattaaattttaacctggtggaaaaataatttgaaatna

SEQ ID NO: 6 - DNA, 818 bp, Homo sapien
  misc_feature (1)...(818): n = A,T,C or G
ttttttttttttttttttttaagaccctcatcaatagatggagacatacagaaatagtcaaaccacatctacaaaatgccagtatcaggcggcggcttcgaagccaaagtgatgtttggatgtaaagtgaaatattagttggcggatgaagcagatagtgaggaaagttgagccaataatgacgtgaagtccgtggaagcctgtggctacaaaaaatgttgagccgtagatgccgtcggaaatggtgaagggagactcgaagtactctgaggcttgtaggagggtaaaatagagacccagtaaaattgtaataagcagtgcttgaattatttggtttcggttgttttctattagactatggtgagctcaggtgattgatactcctgatgcgagtaatacggatgtgtttaggagtgggacttctaggggatttagcggggtgatgcctgttgggggccagtgccctcctagttggggggtaggggctaggctggagtggtaaaaggctcagaaaaatcctgcgaagaaaaaaacttctgaggtaataaataggattatcccgtatcgaaggcctttttggacaggtggtgtgtggtggccttggtatgtgctttctcgtgttacatcgcgccatcattggtatatggttagtgtgttgggttantanggcctantatgaagaacttttggantggaattaaatcaatngcttggccggaagtcattanganggctnaaaaggccctgttangggtctgggctnggttttacccnacccatggaatncnccccccggacnantgnatccctattcttaa

SEQ ID NO: 7 - DNA, 817 bp, Homo sapien
  misc_feature (1)...(817): n = A,T,C or G
tttttttttttttttttttttggctctagagggggtagagggggtgctatagggtaaatacgggccctatttcaaagatttttaggggaattaattctaggacgatgggtatgaaactgtggtttgctccacagatttcagagcattgaccgtagtatacccccggtcgtgtagcggtgaaagtggtttggtttagacgtccgggaattgcatctgtttttaagcctaatgtggggacagctcatgagtgcaagacgtcttgtgatgtaattattatacnaatgggggcttcaatcgggagtactactcgattgtcaacgtcaaggagtcgcaggtcgcctggttctaggaataatgggggaagtatgtaggaattgaagattaatccgccgtagtcggtgttctcctaggttcaataccattggtggccaattgatttgatggtaaggggagggatcgttgaactcgtctgttatgtaaaggatnccttngggatgggaaggcnatnaaggactanggatnaatggcgggcangatatttcaaacngtctctanttcctgaaacgtctgaaatgttaataanaattaantttngttattgaatnttnnggaaaagggcttacaggactagaaaccaaatangaaaantaatnntaanggcnttatcntnaaaggtnataaccnctcctatnatcccacccaatngnattccccacncnnacnattggatnccccanttccanaaanggccnccccccggtgnannccnccttttgttcccttnantganggttattcncccctngcnttatcancc

SEQ ID NO: 8 - DNA, 799 bp, Homo sapien
  misc_feature (1)...(799): n = A,T,C or G
catttccgggtttactttctaaggaaagccgagcggaagctgctaacgtgggaatcggtgcataaggagaactttctgctggcacgcgctagggacaagcgggagagcgactccgagcgtctgaagcgcacgtcccagaaggtggacttggcactgaaacagctgggacacatccgcgagtacgaacagcgcctgaaagtgctggagcgggaggtccagcagtgtagccgcgtcctggggtgggtggccgangcctganccgctctgccttgctgcccccangtgggccgccaccccctgacctgcctgggtccaaacactgagccctgctggcggacttcaagganaacccccacanggggattttgctcctanantaaggctcatctgggcctcggcccccccacctggttggccttgtctttgangtgagccccatgtccatctgggccactgtcnggaccacctttngggagtgttctccttacaaccacannatgcccggctcctcccggaaaccantcccancctgngaaggatcaagncctgnatccactnntnctanaaccggccnccnccgcngtggaacccnccttntgttccttttcnttnagggttaatnncgccttggccttnccanngtcctncncnttttccnntgttnaaattgttangcncccnccnntcccncnncnncnancccgacccnnannttnnannncctgggggtnccnncngattgacccnnccnccctntanttgcnttngggnncnntgcccctttccctctnggganncg

SEQ ID NO: 9 - DNA, 801 bp, Homo sapien
  misc_feature (1)...(801): n = A,T,C or G
acgccttgatcctcccaggctgggactggttctgggaggagccgggcatgctgtggtttgtaangatgacactcccaaaggtggtcctgacagtggcccagatggacatggggctcacctcaaggacaaggccaccaggtgcgggggccgaagcccacatgatccttactctatgagcaaaatcccctgtgggggcttctccttgaagtccgccancagggctcagtctttggacccangcaggtcatggggttgtngnccaactgggggccncaacgcaaaanggcncagggcctcngncacccatcccangacgcggctacactnctggacctcccnctccaccactttcatgcgctgttcntacccgcgnatntgtcccanctgtttcngtgccnactccancttctnggacgtgcgctacatacgcccggantcncnctcccgctttgtccctatccacgtnccancaacaaatttcnccntantgcaccnattcccacntttnncagntttccncnncgngcttccttntaaaagggttganccccggaaaatnccccaaagggggggggccnggtacccaactnccccctnatagctgaantccccatnaccnngnctcnatgganccntccnttttaannacnttctnaacttgggaananccctcgnccntncccccnttaatcccnccttgcnangnncntcccccnntccncccnnntnggcntntnanncnaaaaaggcccnnnancaatctcctnncncctcanttcgccanccctcgaaatcggccnc

SEQ ID NO: 10 - DNA, 789 bp, Homo sapien
  misc_feature (1)...(789): n = A,T,C or G
cagtctatntggccagtgtggcagctttccctgtggctgccggtgccacatgcctgtcccacagtgtggccgtggtgacagcttcagccgccctcaccgggttcaccttctcagccctgcagatcctgccctacacactggcctccctctaccaccgggagaagcaggtgttcctgcccaaataccgaggggacactggaggtgctagcagtgaggacagcctgatgaccagcttcctgccaggccctaagcctggagctcccttccctaatggacacgtgggtgctggaggcagtggcctgctcccacctccacccgcgctctgcggggcctctgcctgtgatgtctccgtacgtgtggtggtgggtgagcccaccgangccagggtggttccgggccggggcatctgcctggacctcgccatcctggatagtgcttcctgctgtcccangtggccccatccctgtttatgggctccattgtccagctcagccagtctgtcactgcctatatggtgtctgccgcaggcctgggtctggtcccatttactttgctacacaggtantatttgacaagaacganttggccaaatactcagcgttaaaaaattccagcaacattgggggtggaaggcctgcctcactgggtccaactccccgctcctgttaaccccatggggctgccggcttggccgccaatttctgttgctgccaaantnatgtggctctctgctgccacctgttgctggctgaagtgcntacngcncanctnggggggtngggngttccc

SEQ ID NO: 11 - DNA, 772 bp, Homo sapien
  misc_feature (1)...(772): n = A,T,C or G
cccaccctacccaaatattagacaccaacacagaaaagctagcaatggattcccttctactttgttaaataaataagttaaatatttaaatgcctgtgtctctgtgatggcaacagaaggaccaacaggccacatcctgataaaaggtaagaggggggtggatcagcaaaaagacagtgctgtgggctgaggggacctggttcttgtgtgttgcccctcaggactcttcccctacaaataactttcatatgttcaaatcccatggaggagtgtttcatcctagaaactcccatgcaagagctacattaaacgaagctgcaggttaaggggcttanagatgggaaaccaggtgactgagtttattcagctcccaaaaacccttctctaggtgtgtctcaactaggaggctagctgttaaccctgagcctgggtaatccacctgcagagtccccgcattccagtgcatggaacccttctggcctccctgtataagtccagactgaaacccccttggaaggnctccagtcaggcagccctanaaactggggaaaaaagaaaaggacgccccancccccagctgtgcanctacgcacctcaacagcacagggtggcagcaaaaaaaccactttactttggcacaaacaaaaactngggggggcaaccccggcaccccnangggggttaacaggaancngggnaacntggaacccaattnaggcaggcccnccaccccnaatnttgctgggaaatttttcctcccctaaattntttc

SEQ ID NO: 12 - DNA, 751 bp, Homo sapien
  misc_feature (1)...(751): n = A,T,C or G
gccccaattccagctgccacaccacccacggtgactgcattagttcggatgtcatacaaaagctgattgaagcaaccctctactttttggtcgtgagccttttgcttggtgcaggtttcattggctgtgttggtgacgttgtcattgcaacagaatgggggaaaggcactgttctctttgaagtanggtgagtcctcaaaatccgtatagttggtgaagccacagcacttgagccctttcatggtggtgttccacacttgagtgaagtcttcctgggaaccataatctttcttgatggcaggcactaccagcaacgtcagggaagtgctcagccattgtggtgtacaccaaggcgaccacagcagctgcnacctcagcaatgaagatgangaggangatgaagaagaacgtcncgagggcacacttgctctcagtcttancaccatancagcccntgaaaaccaanancaaagaccacnacnccggctgcgatgaagaaatnaccccncgttgacaaacttgcatggcactggganccacagtggcccnaaaaatcttcaaaaaggatgccccatcnattgaccccccaaatgcccactgccaacaggggctgccccacncncnnaacgatganccnattgnacaagatctncntggtcttnatnaacntgaaccctgcntngtggctcctgttcaggnccnnggcctgacttctnaannaangaactcngaagnccccacnggananncg

SEQ ID NO: 13 - DNA, 729 bp, Homo sapien
  misc_feature (1)...(729): n = A,T,C or G
gagccaggcgtccctctgcctgcccactcagtggcaacacccgggagctgttttgtcctttgtggancctcagcagtnccctctttcagaactcantgccaaganccctgaacaggagccaccatgcagtgcttcagcttcattaagaccatgatgatcctcttcaatttgctcatctttctgtgtggtgcagccctgttggcagtgggcatctgggtgtcaatcgatggggcatcctttctgaagatcttcgggccactgtcgtccagtgccatgcagtttgtcaacgtgggctacttcctcatcgcagccggcgttgtggtcttagctctaggtttcctgggctgctatggtgctaagactgagagcaagtgtgccctcgtgacgttcttcttcatcctcctcctcatcttcattgctgaggttgcaatgctgtggtcgccttggtgtacaccacaatggctgagcacttcctgacgttgctggtaatgcctgccatcaanaaaagattatgggttcccaggaanacttcactcaagtgttggaacaccaccatgaaagggctcaagtgctgtggcttcnnccaactatacggattttgaagantcacctacttcaaagaaaanagtgcctttcccccatttctgttgcaattgacaaacgtccccaacacagccaattgaaaacctgcacccaacccaaangggtccccaaccanaaattnaaggg

SEQ ID NO: 14 - DNA, 816 bp, Homo sapien
  misc_feature (1)...(816): n = A,T,C or G
tgctcttcctcaaagttgttcttgttgccataacaaccaccataggtaaagcgggcgcagtgttcgctgaaggggttgtagtaccagcgcgggatgctctccttgcagagtcctgtgtctggcaggtccacgcagtgccctttgtcactggggaaatggatgcgctggagctcgtcaaagccactcgtgtatttttcacaggcagcctcgtccgacgcgtcggggcagttgggggtgtcttcacactccaggaaactgtcnatgcagcagccattgctgcagcggaactgggtgggctgacangtgccagagcacactggatggcgcctttccatgnnangggccctgngggaaagtccctganccccananctgcctctcaaangccccaccttgcacaccccgacaggctagaatggaatcttcttcccgaaaggtagttnttcttgttgcccaanccanccccntaaacaaactcttgcanatctgctccgngggggtcntantaccancgtgggaaaagaaccccaggcngcgaaccaancttgtttggatncgaagcnataatctnctnttctgcttggtggacagcaccantnactgtnnanctttagnccntggtcctcntgggttgnncttgaacctaatcnccnntcaactgggacaaggtaantngccntcctttnaattcccnancntnccccctggtttggggttttncncnctcctaccccagaaannccgtgttcccccccaactaggggccnaaaccnnttnttccacaaccctnccccacccacgggttcngntggttng

SEQ ID NO: 15 - DNA, 783 bp, Homo sapien
  misc_feature (1)...(783): n = A,T,C or G
ccaaggcctgggcaggcatanacttgaaggtacaaccccaggaacccctggtgctgaaggatgtggaaaacacagattggcgcctactgcggggtgacacggatgtcagggtagagaggaaagacccaaaccaggtggaactgtggggactcaaggaangcacctacctgttccagctgacagtgactagctcagaccacccagaggacacggccaacgtcacagtcactgtgctgtccaccaagcagacagaagactactgcctcgcatccaacaangtgggtcgctgccggggctctttcccacgctggtactatgaccccacggagcagatctgcaagagtttcgtttatggaggctgcttgggcaacaagaacaactaccttcgggaagaagagtgcattctancctgtcngggtgtgcaaggtgggcctttganangcanctctggggctcangcgactttcccccagggcccctccatggaaaggcgccatccantgttctctggcacctgtcagcccacccagttccgctgcancaatggctgctgcatcnacantttcctngaattgtgacaacaccccccantgcccccaaccctcccaacaaagcttccctgttnaaaaatacnccanttggcttttnacaaacncccggcncctccnttttccccnntnaacaaagggcnctngcntttgaactgcccnaacccnggaatctnccnnggaaaaantnccccccctggttcctnnaancccctccncnaaanctncccccccc

SEQ ID NO: 16 - DNA, 801 bp, Homo sapien
  misc_feature (1)...(801): n = A,T,C or G
gccccaattccagctgccacaccacccacggtgactgcattagttcggatgtcatacaaaagctgattgaagcaaccctctactttttggtcgtgagccttttgcttggtgcaggtttcattggctgtgttggtgacgttgtcattgcaacagaatgggggaaaggcactgttctctttgaagtagggtgagtcctcaaaatccgtatagttggtgaagccacagcacttgagccctttcatggtggtgttccacacttgagtgaagtcttcctgggaaccataatctttcttgatggcaggcactaccagcaacgtcaggaagtgctcagccattgtggtgtacaccaaggcgaccacagcagctgcaacctcagcaatgaagatgaggaggaggatgaagaagaacgtcncgagggcacacttgctctccgtcttagcaccatagcagcccangaaaccaagagcaaagaccacaacgccngctgcgaatgaaagaaantacccacgttgacaaactgcatggccactggacgacagttggcccgaanatcttcagaaaagggatgccccatcgattgaacacccanatgcccactgccnacagggctgcnccncncngaaagaatgagccattgaagaaggatcntcntggtcttaatgaactgaaaccntgcatggtggcccctgttcagggctcttggcagtgaattctganaaaaaggaacngcntnagcccccccaaanganaaaacacccccgggtgttgccctgaattggcggccaagganccctgccccng

SEQ ID NO: 17 - DNA, 740 bp, Homo sapien
  misc_feature (1)...(740): n = A,T,C or G
gtgagagccaggcgtccctctgcctgcccactcagtggcaacacccgggagctgttttgtcctttgtggagcctcagcagttccctctttcagaactcactgccaagagccctgaacaggagccaccatgcagtgcttcagcttcattaagaccatgatgatcctcttcaatttgctcatctttctgtgtggtgcagccctgttggcagtgggcatctgggtgtcaatcgatggggcatcctttctgaagatcttcgggccactgtcgtccagtgccatgcagtttgtcaacgtgggctacttcctcatcgcagccggcgttgtggtctttgctcttggtttcctgggctgctatggtgctaagacggagagcaagtgtgccctcgtgacgttcttcttcatcctcctcctcatcttcattgctgaagttgcagctgctgtggtcgccttggtgtacaccacaatggctgaaccattcctgacgttgctggtantgcctgccatcaanaaagattatgggttcccaggaaaaattcactcaantntggaacaccnccatgaaaagggctccaatttctgntggcttccccaactataccggaattttgaaagantcnccctacttccaaaaaaaaananttgcctttncccccnttctgttgcaatgaaaacntcccaanacngccaatnaaaacctgcccnnncaaaaaggntcncaaacaaaaaaantnnaagggttn

SEQ ID NO: 18 - DNA, 802 bp, Homo sapien
  misc_feature (1)...(802): n = A,T,C or G
ccgctggttgcgctggtccagngnagccacgaagcacgtcagcatacacagcctcaatcacaaggtcttccagctgccgcacattacgcagggcaagagcctccagcaacactgcatatgggatacactttactttagcagccagggtgacaactgagaggtgtcgaagcttattcttctgagcctctgttagtggaggaagattccgggcttcagctaagtagtcagcgtatgtcccataagcaaacactgtgagcagccggaaggtagaggcaaagtcactctcagccagctctctaacattgggcatgtccagcagttctccaaacacgtagacaccagnggcctccagcacctgatggatgagtgtggccagcgctgcccccttggccgacttggctaggagcagaaattgctcctggttctgccctgtcaccttcacttccgcactcatcactgcactgagtgtgggggacttgggctcaggatgtccagagacgtggttccgccccctcncttaatgacaccgnccanncaaccgtcggctcccgccgantgngttcgtcgtncctgggtcagggtctgctggccnctacttgcaancttcgtcnggcccatggaattcaccncaccggaactngtangatccactnnttctataaccggncgccaccgcnnntggaactccactcttnttncctttacttgagggttaaggtcacccttnncgttaccttggtccaaaccntnccntgtgtcganatngtnaatcnggnccnatnccanccncatangaagccng

SEQ ID NO: 19 - DNA, 731 bp, Homo sapien
  misc_feature (1)...(731): n = A,T,C or G
cnaagcttccaggtnacgggccgcnaancctgacccnaggtancanaangcagncngcgggagcccaccgtcacgnggnggngtctttatnggagggggcggagccacatcnctggacntcntgaccccaactccccnccncncantgcagtgatgagtgcagaactgaaggtnacgtggcaggaaccaagancaaannctgctccnntccaagtcggcnnagggggcggggctggccacgcncatccntcnagtgctgnaaagccccnncctgtctacttgtttggagaacngcnnngacatgcccagngttanataacnggcngagagtnantttgcctctcccttccggctgcgcancgngtntgcttagnggacataacctgactacttaactgaacccnngaatctnccncccctccactaagctcagaacaaaaaacttcgacaccactcanttgtcacctgnctgctcaagtaaagtgtaccccatncccaatgtntgctngangctctgncctgcnttangttcggtcctgggaagacctatcaattnaagctatgtttctgactgcctcttgctccctgnaacaancnacccnncnntccaagggggggncggcccccaatccccccaaccntnaattnantttanccccncccccnggcccggccttttacnancntcnnnnacngggnaaaaccnnngctttncccaacnnaatccncct

SEQ ID NO: 20 - DNA, 754 bp, Homo sapien
  misc_feature (1)...(754): n = A,T,C or G
tttttttttttttttttttttaaaaaccccctccattnaatgnaaacttccgaaattgtccaaccccctcntccaaatnnccntttccgggngggggttccaaacccaanttanntttggannttaaattaaatnttnnttggnggnnnaanccnaatgtnangaaagttnaacccantatnancttnaatncctggaaaccngtngnttccaaaaatntttaacccttaantccctccgaaatngttnanggaaaacccaanttctcntaaggttgtttgaaggntnaatnaaaancccnnccaattgtttttngccacgcctgaattaattggnttccgntgttttccnttaaaanaaggnnanccccggttantnaatccccccnnccccaattataccgantttttttngaattgggancccncgggaattaacggggnnnntccctnttggggggcnggnnccccccccntcgggggttngggncaggncnnaattgtttaagggtccgaaaaatccctccnagaaaaaaanctcccaggntgagnntngggtttnccccccccccanggcccctctcgnanagttggggtttggggggcctgggattttntttcccctnttncctcccccccccccnggganagaggttngngttttgntcnncggccccnccnaaganctttnccganttnanttaaatccntgcctnggcgaagtccnttgnagggntaaanggccccctnncggg

SEQ ID NO: 21 - DNA, 755 bp, Homo sapien
  misc_feature (1)...(755): n = A,T,C or G
atcancccatgaccccnaacnngggaccnctcanccggncnnncnaccnccggccnatcanngtnagnncactncnnttnnatcacnccccnccnactacgcccncnanccnacgcnctanncanatnccactganngcgcgangtnganngagaaanctnataccanagncaccanacnccagctgtccnanaangcctnnnatacnggnnnatccaatntgnancctccnaagtattnnncnncanatgattttcctnanccgattacccntnccccctancccctcccccccaacnacgaaggcnctggnccnaaggnngcgncnccccgctagntccccnncaagtcncncncctaaactcanccnnattacncgcttcntgagtatcactccccgaatctcaccctactcaactcaaaaanatcngatacaaaataatncaagcctgnttatnacactntgactgggtctctattttagnggtccntnaancntcctaatacttccagtctnccttcnccaatttccnaanggctctttcngacagcatnttttggttcccnnttgggttcttanngaattgcccttcntngaacgggctcntcttttccttcggttancctggnttcnnccggccagttattatttcccnttttaaattcntnccntttanttttggcnttcnaaacccccggccttgaaaacggccccctggtaaaaggttgttttganaaaatttttgttttgttcc

SEQ ID NO: 22 - DNA, 849 bp, Homo sapien
  misc_feature (1)...(849): n = A,T,C or G
tttttttttttttttangtgtngtcgtgcaggtagaggcttactacaantgtgaanacgtacgctnggantaangcgacccganttctagganncnccctaaaatcanactgtgaagatnatcctgnnnacggaanggtcaccggnngatnntgctagggtgnccnctcccannncnttncataactcngnggccctgcccaccaccttcggcggcccngngnccgggcccgggtcattngnnttaaccncactnngcnancggtttccnnccccnncngacccnggcgatccggggtnctctgtcttcccctgnagncnanaaantgggccncggncccctttacccctnnacaagccacngccntctanccncngccccccctccantnngggggactgccnanngctccgttnctngnnaccccnnngggtncctcggttgtcgantcnaccgnangccanggattccnaaggaaggtgcgttnttggcccctacccttcgctncggnncacccttcccgacnanganccgctcccgcncnncgnngcctcncctcgcaacacccgcnctcntcngtncggnnncccccccacccgcnccctcncncngncgnancnctccnccnccgtctcanncaccaccccgccccgccaggccntcanccacnggnngacnngnagcncnntcgcnccgcgcngcgncnccctcgccncngaactncntcnggccantnncgctcaanccnnacnaaacgccgctgcgcggcccgnagcgnccncctccncgagtcctcccgncttccnacccangnnttccncgaggacacnnnaccccgccnncangcgg

SEQ ID NO: 23 - DNA, 872 bp, Homo sapien
  misc_feature (1)...(872): n = A,T,C or G
gcgcaaactatacttcgctcgnactcgtgcgcctcgctnctcttttcctccgcaaccatgtctgacnancccgattnggcngatatcnanaagntcgancagtccaaactgantaacacacacacncnanaganaaatccnctgccttccanagtanacnattgaacnngagaaccangcnggcgaatcgtaatnaggcgtgcgccgccaatntgtcnccgtttattntnccagcntcncctnccnaccctacntcttcnnagctgtcnnacccctngtncgnaccccccnaggtcgggatcgggtttnnnntgaccgngcnncccctccccccntccatnacganccncccgcaccaccnanngcncgcnccccgnnctcttcgccnccctgtcctntncccctgtngcctggcncngnaccgcattgaccctcgccnnctncnngaaancgnanacgtccgggttgnnannancgctgtgggnnngcgtctgcnccgcgttccttccnncnncttccaccatcttcnttacngggtctccncgccntctcnnncacnccctgggacgctntcctntgccccccttnactcccccccttcgncgtgncccgnccccaccntcatttncanacgntcttcacaannncctggntnnctcccnancngncngtcanccnagggaagggnggggnnccnntgnttgacgttgnggngangtccgaanantcctcnccntcancnctacccctcgggcgnnctctcngttnccaacttancaantctcccccgngngcncntctcagcctcncccnccccnctctctgcantgtnctctgctctnaccnntacgantnttcgncnccctctttcc

SEQ ID NO: 24 - DNA, 815 bp, Homo sapien
  misc_feature (1)...(815): n = A,T,C or G
gcatgcaagcttgagtattctatagngtcacctaaatancttggcntaatcatggtcntanctgncttcctgtgtcaaatgtatacnaantanatatgaatctnatntgacaaganngtatcntncattagtaacaantgtnntgtccatcctgtcngancanattcccatnnattncgncgcattcncngcncantatntaatngggaantcnnntnnnncaccnncatctatcntnccgcnccctgactggnagagatggatnanttctnntntgaccnacatgttcatcttggattnaananccccccgcngnccaccggttngnngcnagccnntcccaagacctcctgtggaggtaacctgcgtcaganncatcaaacntgggaaacccgcnnccangtnnaagtngnnncanangatcccgtccaggnttnaccatcccttcncagcgccccctttngtgccttanagngnagcgtgtccnanccnctcaacatganacgcgccagnccanccgcaattnggcacaatgtcgncgaaccccctagggggantnatncaaanccccaggattgtccncncangaaatcccncanccccnccctacccnnctttgggacngtgaccaantcccggagtnccagtccggccngnctcccccaccggtnnccntgggggggtgaanctcngnntcanccngncgaggnntcgnaaggaaccggncctnggncgaanngancnntcngaagngccncntcgtataaccccccctcnccanccnacngntagntcccccccngggtncggaangg

SEQ ID NO: 25 - DNA, 775 bp, Homo sapien
  misc_feature (1)...(775): n = A,T,C or G
ccgagatgtctcgctccgtggccttagctgtgctcgcgctactctctctttctggcctggaggctatccagcgtactccaaagattcaggtttactcacgtcatccagcagagaatggaaagtcaaatttcctgaattgctatgtgtctgggtttcatccatccgacattgaanttgacttactgaagaatgganagagaattgaaaaagtggagcattcagacttgtctttcagcaaggactggtctttctatctcntgtactacactgaattcacccccactgaaaaagatgagtatgcctgccgtgtgaaccatgtgactttgtcacagcccaagatagttaagtgggatcgagacatgtaagcagncnncatggaagtttgaagatgccgcatttggattggatgaattccaaattctgcttgcttgcnttttaatantgatatgcntatacaccctaccctttatgnccccaaattgtaggggttacatnantgttcncntnggacatgatcttcctttataantccnccnttcgaattgcccgtcncccngttnngaatgtttccnnaaccacggttggctcccccaggtcncctcttacggaagggcctgggccnctttncaaggttgggggaaccnaaaatttcncttntgcccncccnccacnntcttgngnncncantttggaacccttccnattccccttggcctcnnanccttnnctaanaaaacttnaaancgtngcnaaanntttnacttccccccttacc

SEQ ID NO: 26 - DNA, 820 bp, Homo sapien
  misc_feature (1)...(820): n = A,T,C or G
anattantacagtgtaatcttttcccagaggtgtgtanagggaacggggcctagaggcatcccanagatancttatancaacagtgctttgaccaagagctgctgggcacatttcctgcagaaaaggtggcggtccccatcactcctcctctcccatagccatcccagaggggtgagtagccatcangccttcggtgggagggagtcanggaaacaacanaccacagagcanacagaccantgatgaccatgggcgggagcgagcctcttccctgnaccggggtggcananganagcctanctgaggggtcacactataaacgttaacgaccnagatnancacctgcttcaagtgcacccttcctacctgacnaccagngaccnnnaactgcngcctggggacagcnctgggancagctaacnnagcactcacctgcccccccatggccgtncgcntccctggtcctgncaagggaagctccctgttggaattncgggganaccaaggganccccctcctccanctgtgaaggaaaaanngatggaattttncccttccggccnntcccctcttcctttacacgccccctnntactcntctccctctnttntcctgncncacttttnaccccnnnatttcccttnattgatcggannctnganattccactnncgcctnccntcnatcngnaanacnaaanactntctnacccnggggatgggnncctcgntcatcctctctttttcnctaccnccnnttctttgcctctccttngatcatccaaccntcgntggccntncccccccnnntcctttnccc

SEQ ID NO: 27 - DNA, 818 bp, Homo sapien
  misc_feature (1)...(818): n = A,T,C or G
tctgggtgatggcctcttcctcctcagggacctctgactgctctgggccaaagaatctcttgtttcttctccgagccccaggcagcggtgattcagccctgcccaacctgattctgatgactgcggatgctgtgacggacccaaggggcaaatagggtcccagggtccagggaggggcgcctgctgagcacttccgcccctcaccctgcccagcccctgccatgagctctgggctgggtctccgcctccagggttctgctcttccangcangccancaagtggcgctgggccacactggcttcttcctgccccntccctggctctgantctctgtcttcctgtcctgtgcangcnccttggatctcagtttccctcnctcanngaactctgtttctganntcttcanttaactntgantttatnaccnantggnctgtnctgtcnnactttaatgggccngaccggctaatccctccctcnctcccttccanttcnnnnaaccngcttnccntcntctccccntancccgccngggaancctcctttgccctnaccangggccnnnaccgcccntnnctnggggggcnnggtnnctncncctgntnnccccnctcncnnttncctcgtcccnncnncgcnnngcannttcncngtcccnntnnctcttcnngtntcgnaangntcncntntnnnnngncnngntnntncntccctctcnccnnntgnangtnnttnnnncncngnnccccnnnncnnnnnnggnnntnnntctncncngccccnncccccngnattaaggcctccnntctccggccnc

SEQ ID NO: 28 - DNA, 731 bp, Homo sapien
  misc_feature (1)...(731): n = A,T,C or G
aggaagggcggagggatattgtangggattgagggataggagnataangggggaggtgtgtcccaacatganggtgnngttctcttttgaangagggttgngtttttannccnggtgggtgattnaaccccattgtatggagnnaaaggntttnagggatttttcggctcttatcagtatntanattcctgtnaatcggaaaatnatntttcnncnggaaaatnttgctcccatccgnaaattnctcccgggtagtgcatnttngggggncngccangtttcccaggctgctanaatcgtactaaagnttnaagtgggantncaaatgaaaacctnncacagagnatccntacccgactgtnnnttnccttcgccctntgactctgcnngagcccaatacccnngngnatgtcncccngnnnngcgncnctgaaannnnctcgnggctnngancatcanggggtttcgcatcaaaagcnncgtttcncatnaaggcactttngcctcatccaaccnctngccctcnnccatttngccgtcnggttcncctacgctnntngcncctnnntnganattttncccgcctngggnaancctcctgnaatgggtagggncttntcttttnaccnngnggtntactaatcnnctncacgcntnctttctcnaccccccccctttttcaatcccancggcnaatggggtctccccnncganggggggnnncccanncc

SEQ ID NO: 29 - DNA, 822 bp, Homo sapien
  misc_feature (1)...(822): n = A,T,C or G
actagtccagtgtggtggaattccattgtgttggggncncttctatgantantnttagatcgctcanacctcacancctcccnacnangcctataangaanannaataganctgtncnntatntntacnctcatanncctcnnnacccactccctcttaacccntactgtgcctatngcntnnctantctntgccgcctncnanccaccngtgggccnaccncnngnattctcnatctcctcnccatntngcctanantangtncataccctatacctacnccaatgctannnctaancntccatnanttannntaactaccactgacntngactttcncatnanctcctaatttgaatctactctgactcccacngcctannnattagcancntcccccnacnatntctcaaccaaatcntcaacaacctatctanctgttcnccaaccnttncctccgatccccnnacaacccccctcccaaatacccnccacctgacncctaacccncaccatcccggcaagccnanggncatttanccactggaatcacnatngganaaaaaaaacccnaactctctancncnnatctccctaanaaatnctcctnnaatttactnncantnccatcaancccacntgaaacnnaacccctgtttttanatcccttctttcgaaaaccnaccctttannncccaacctttngggcccccccnctncccnaatgaaggncncccaatcnangaaacgnccntgaaaaancnaggcnaanannntccgcanatcctatcccttanttnggggncccttncccngggcccc

SEQ ID NO: 30 - DNA, 787 bp, Homo sapien
  misc_feature (1)...(787): n = A,T,C or G
cggccgcctgctctggcacatgcctcctgaatggcatcaaaagtgatggactgcccattgctagagaagaccttctctcctactgtcattatggagccctgcagactgagggctccccttgtctgcaggatttgatgtctgaagtcgtggagtgtggcttggagctcctcatctacatnagctggaagccctggagggcctctctcgccagcctcccccttctctccacgctctccanggacaccaggggctccaggcagcccattattcccagnangacatggtgtttctccacgcggacccatggggcctgnaaggccagggtctcctttgacaccatctctcccgtcctgcctggcaggccgtgggatccactanttctanaacggncgccaccncggtgggagctccagcttttgttcccnttaatgaaggttaattgcncgcttggcgtaatcatnggtcanaactntttcctgtgtgaaattgtttntcccctcncnattccncncnacatacnaacccggaancataaagtgttaaagcctgggggtngcctnnngaatnaactnaactcaattaattgcgttggctcatggcccgctttccnttcnggaaaactgtcntcccctgcnttnntgaatcggccaccccccngggaaaagcggtttgcnttttngggggntccttccncttcccccctcnctaanccctncgcctcggtcgttncnggtngcggggaangggnatnnnctcccncnaagggggngagnnngntatccccaaa

SEQ ID NO: 31 - DNA, 799 bp, Homo sapien
  misc_feature (1)...(799): n = A,T,C or G
tttttttttttttttttggcgatgctactgtttaattgcaggaggtgggggtgtgtgtaccatgtaccagggctattagaagcaagaaggaaggagggagggcagagcgccctgctgagcaacaaaggactcctgcagccttctctgtctgtctcttggcgcaggcacatggggaggcctcccgcagggtgggggccaccagtccaggggtgggagcactacanggggtgggagtgggtggtggctggtncnaatggcctgncacanatccctacgattcttgacacctggatttcaccaggggaccttctgttctcccanggnaacttcntnnatctcnaaagaacacaactgtttcttcngcanttctggctgttcatggaaagcacaggtgtccnatttnggctgggacttggtacatatggttccggcccacctctcccntcnaanaagtaattcacccccccccnccntctnttgcctgggcccttaantacccacaccggaactcanttanttattcatcttnggntgggcttgntnatcnccncctgaangcgccaagttgaaaggccacgccgtncccnctccccatagnannttttnncntcanctaatgcccccccnggcaacnatccaatccccccccntgggggccccagcccanggcccccgnctcgggnnnccngncncgnantccccaggntctcccantcngncccnnngcncccccgcacgcagaacanaaggntngagccnccgcannnnnnnggtnncnacctcgccccccccnncgnng

SEQ ID NO: 32 - DNA, 789 bp, Homo sapien
  misc_feature (1)...(789): n = A,T,C or G
ttttttttttttttttttttttttttttttttttttttttttttttttttttttttttttttttnccnagggcaggtttattgacaacctcncgggacacaancaggctggggacaggacggcaacaggctccggcggcggcggcggcggccctacctgcggtaccaaatntgcagcctccgctcccgcttgatnttcctctgcagctgcaggatgccntaaaacagggcctcggccntnggtgggcaccctgggatttnaatttccacgggcacaatgcggtcgcancccctcaccaccnattaggaatagtggtnttacccnccnccgttggcncactccccntggaaaccacttntcgcggctccggcatctggtcttaaaccttgcaaacnctggggccctctttttggttantntnccngccacaatcatnactcagactggcncgggctggccccaaaaaancnccccaaaaccggnccatgtcttnncggggttgctgcnatntncatcacctcccgggcncancaggncaacccaaaagttcttgnggcccncaaaaaanctccggggggncccagtttcaacaaagtcatcccccttggcccccaaatcctccccccgnttnctgggtttgggaacccacgcctctnnctttggnnggcaagntggntcccccttcgggcccccggtgggcccnnctctaangaaaacnccntcctnnncaccatccccccnngnnacgnctancaangnatccctttttttanaaacgggccccccncg

SEQ ID NO: 33 - DNA, 793 bp, Homo sapien
  misc_feature (1)...(793): n = A,T,C or G
gacagaacatgttggatggtggagcacctttctatacgacttacaggacagcagatggggaattcatggctgttggagcaatanaaccccagttctacgagctgctgatcaaaggacttggactaaagtctgatgaacttcccaatcagatgagcatggatgattggccagaaatgaanaagaagtttgcagatgtatttgcaaagaagacgaaggcagagtggtgtcaaatctttgacggcacagatgcctgtgtgactccggttctgacttttgaggaggttgttcatcatgatcacaacaangaacggggctcgtttatcaccantgaggagcaggacgtgagcccccgccctgcacctctgctgttaaacaccccagccatcccttctttcaaaagggatccactacttctagagcggncgccaccgcggtggagctccagcttttgttccctttagtgagggttaattgcgcgcttggcgtaatcatggtcatanctgtttcctgtgtgaaattgttatccgctcacaattccacacaacatacganccggaagcatnaaattttaaagcctggnggtngcctaatgantgaactnactcacattaattggctttgcgctcactgcccgctttccagtccggaaaacctgtccttgccagctgccnttaatgaatcnggccaccccccggggaaaaggcngtttgcttnttggggcgcncttcccgctttctcgcttcctgaantccttccccccggtctttcggcttgcggcnaacggtatcnacct

SEQ ID NO: 34 - DNA, 756 bp, Homo sapien
  misc_feature (1)...(756): n = A,T,C or G
gccgcgaccggcatgtacgagcaactcaagggcgagtggaaccgtaaaagccccaatcttancaagtgcggggaanagctgggtcgactcaagctagttcttctggagctcaacttcttgccaaccacagggaccaagctgaccaaacagcagctaattctggcccgtgacatactggagatcggggcccaatggagcatcctacgcaangacatcccctccttcgagcgctacatggcccagctcaaatgctactactttgattacaangagcagctccccgagtcagcctatatgcaccagctcttgggcctcaacctcctcttcctgctgtcccagaaccgggtggctgantnccacacgganttggancggctgcctgcccaangacatacanaccaatgtctacatcnaccaccagtgtcctggagcaatactgatgganggcagctaccncaaagtnttcctggccnagggtaacatcccccgccgagagctacaccttcttcattgacatcctgctcgacactatcagggatgaaaatcgcngggttgctccagaaaggctncaanaanatccttttcnctgaaggcccccggatncnctagtnctagaatcggcccgccatcgcggtggancctccaacctttcgttnccctttactgagggttnattgccgcccttggcgttatcatggtcacnccngttncctgtgttgaaattnttaaccccccacaattccacgccnacattng

SEQ ID NO: 35 - DNA, 834 bp, Homo sapien
  misc_feature (1)...(834): n = A,T,C or G
ggggatctctanatcnacctgnatgcatggttgtcggtgtggtcgctgtcgatgaanatgaacaggatcttgcccttgaagctctcggctgctgtntttaagttgctcagtctgccgtcatagtcagacacnctcttgggcaaaaaacancaggatntgagtcttgatttcacctccaataatcttcngggctgtctgctcggtgaactcgatgacnangggcagctggttgtgtntgataaantccancangttctccttggtgacctccccttcaaagttgttccggccttcatcaaacttctnnaanangannancccanctttgtcgagctggnatttgganaacacgtcactgttggaaactgatcccaaatggtatgtcatccatcgcctctgctgcctgcaaaaaacttgcttggcncaaatccgactccccntccttgaaagaagccnatcacacccccctccctggactccnncaangactctnccgctnccccntccnngcagggttggtggcannccgggcccntgcgcttcttcagccagttcacnatnttcatcagcccctctgccagctgttntattccttgggggggaanccgtctctcccttcctgaannaactttgaccgtnggaatagccgcgcntcnccntacntnctgggccgggttcaaantccctccnttgncnntcncctcgggccattctggatttnccnaactttttccttcccccnccccncggngtttggntttttcatngggccccaactctgctnttggccantcccctgggggcntntancnccccctntggtcccntngggcc

SEQ ID NO: 36 - DNA, 814 bp, Homo sapien
  misc_feature (1)...(814): n = A,T,C or G
cggncgctttccngccgcgccccgtttccatgacnaaggctcccttcangttaaatacnncctagnaaacattaatgggttgctctactaatacatcatacnaaccagtaagcctgcccanaacgccaactcaggccattcctaccaaaggaagaaaggctggtctctccaccccctgtaggaaaggcctgccttgtaagacaccacaatncggctgaatctnaagtcttgtgttttactaatggaaaaaaaaaataaacaanaggttttgttctcatggctgcccaccgcagcctggcactaaaacancccagcgctcacttctgcttgganaaatattctttgctcttttggacatcaggcttgatggtatcactgccacntttccacccagctgggcncccttcccccatntttgtcantganctggaaggcctgaancttagtctccaaaagtctcngcccacaagaccggccaccaggggangtcntttncagtggatctgccaaanantacccntatcatcnntgaataaaaaggcccctgaacganatgcttccancancctttaagacccataatcctngaaccatggtgcccttccggtctgatccnaaaggaatgttcctgggtcccantccctcctttgttncttacgttgtnttggacccntgctngnatnacccaantganatccccngaagcaccctncccctggcatttgantttcntaaattctctgccctacnnctgaaagcacnattccctnggcnccnaanggngaactcaagaaggtctnngaaaaaccacncn

SEQ ID NO: 37 - DNA, 760 bp, Homo sapien
  misc_feature (1)...(760): n = A,T,C or G
gcatgctgctcttcctcaaagttgttcttgttgccataacaaccaccataggtaaagcgggcgcagtgttcgctgaaggggttgtagtaccagcgcgggatgctctccttgcagagtcctgtgtctggcaggtccacgcaatgccctttgtcactggggaaatggatgcgctggagctcgtcnaanccactcgtgtatttttcacangcagcctcctccgaagcntccgggcagttgggggtgtcgtcacactccactaaactgtcgatncancagcccattgctgcagcggaactgggtgggctgacaggtgccagaacacactggatnggcctttccatggaagggcctgggggaaatcncctnancccaaactgcctctcaaaggccaccttgcacaccccgacaggctagaaatgcactcttcttcccaaaggtagttgttcttgttgcccaagcancctccancaaaccaaaancttgcaaaatctgctccgtgggggtcatnnntaccanggttggggaaanaaacccggcngnganccnccttgtttgaatgcnaaggnaataatcctcctgtcttgcttgggtggaanagcacaattgaactgttaacnttgggccgngttccnctngggtggtctgaaactaatcaccgtcactggaaaaaggtangtgccttccttgaattcccaaanttcccctngntttgggtnntttctcctctnccctaaaaatcgtnttccccccccntanggcg

SEQ ID NO: 38 - DNA, 724 bp, Homo sapien
  misc_feature (1)...(724): n = A,T,C or G
tttttttttttttttttttttttttttttttttttaaaaaccccctccattgaatgaaaacttccnaaattgtccaaccccctcnnccaaatnnccatttccgggggggggttccaaacccaaattaattttggantttaaattaaatnttnattnggggaanaanccaaatgtnaagaaaatttaacccattatnaacttaaatncctngaaacccntggnttccaaaaatttttaacccttaaatccctccgaaattgntaanggaaaaccaaattcncctaaggctntttgaaggttngatttaaacccccttnanttnttttnacccnngnctnaantatttngnttccggtgttttcctnttaancntnggtaactcccgntaatgaannnccctaanccaattaaaccgaattttttttgaattggaaattccnngggaattnaccggggtttttcccntttgggggccatncccccnctttcggggtttgggnntaggttgaatttttnnangncccaaaaaancccccaanaaaaaaactcccaagnnttaattngaatntcccccttcccaggccttttgggaaaggngggtttntgggggccnggganttcnttcccccnttnccnccccccccccnggtaaanggttatngnntttggtttttgggccccttnanggaccttccggatngaaattaaatccccgggncggccg

SEQ ID NO: 39 - DNA, 751 bp, Homo sapien
  misc_feature (1)...(751): n = A,T,C or G
tttttttttttttttctttgctcacatttaatttttattttgattttttttaatgctgcacaacacaatatttatttcatttgtttcttttatttcattttatttgtttgctgctgctgttttatttatttttactgaaagtgagagggaacttttgtggccttttttcctttttctgtaggccgccttaagctttctaaatttggaacatctaagcaagctgaanggaaaagggggtttcgcaaaatcactcgggggaanggaaaggttgctttgttaatcatgccctatggtgggtgattaactgcttgtacaattacntttcacttttaattaattgtgctnaangctttaattanacttgggggttccctccccanaccaaccccnctgacaaaaagtgccngccctcaaatnatgtcccggcnntcnttgaaacacacngcngaangttctcattntccccncnccaggtnaaaatgaagggttaccatntttaacnccacctccacntggcnnngcctgaatcctcnaaaancnccctcaancnaattnctnngccccggtcncgcntnngtcccncccgggctccgggaantncacccccngaanncnntnncnaacnaaattccgaaaatattcccnntcnctcaattcccccnnagactntcctcnncnancncaattttcttttnntcacgaacncgnnccnnaaaatgnnnnncncctccnctngtccnnaatcnccanc

SEQ ID NO: 40 - DNA, 753 bp, Homo sapien
  misc_feature (1)...(753): n = A,T,C or G
gtggtattttctgtaagatcaggtgttcctccctcgtaggtttagaggaaacaccctcatagatgaaaacccccccgagacagcagcactgcaactgccaagcagccggggtaggaggggcgccctatgcacagctgggcccttgagacagcagggcttcgatgtcaggctcgatgtcaatggtctggaagcggcggctgtacctgcgtaggggcacaccgtcagggcccaccaggaacttctcaaagttccaggcaacntcgttgcgacacaccggagaccaggtgatnagcttggggtcggtcataancgcggtggcgtcgtcgctgggagctggcagggcctcccgcaggaaggcnaataaaaggtgcgcccccgcaccgttcanctcgcacttctcnaanaccatgangttgggctcnaacccaccaccannccggacttccttganggaattcccaaatctcttcgntcttgggcttctnctgatgccctanctggttgcccngnatgccaancanccccaanccccggggtcctaaancacccncctcctcntttcatctgggttnttntccccggaccntggttcctctcaagggancccatatctcnaccantactcaccntncccccccntgnnacccanccttctanngnttcccncccgncctctggcccntcaaanangcttncacnacctgggtctgccttcccccctnccctatctgnaccccncntttgtctcantnt

SEQ ID NO: 41 - DNA, 341 bp, Homo sapien
actatatccatcacaacagacatgcttcatcccatagacttcttgacatagcttcaaatgagtgaacccatccttgatttatatacatatatgttctcagtattttgggagcctttccacttctttaaaccttgttcattatgaacactgaaaataggaatttgtgaagagttaaaaagttatagcttgtttacgtagtaagtttttgaagtctacattcaatccagacacttagttgagtgttaaactgtgatttttaaaaaatatcatttgagaatattctttcagaggtattttcatttttactttttgattaattgtgttttatatattagggtagt

SEQ ID NO: 42 - DNA, 101 bp, Homo sapien
acttactgaatttagttctgtgctcttccttatttagtgttgtatcataaatactttgatgtttcaaacattctaaataaataattttcagtggcttcata

SEQ ID NO: 43 - DNA, 305 bp, Homo sapien
acatctttgttacagtctaagatgtgttcttaaatcaccattccttcctggtcctcaccctccagggtggtctcacactgtaattagagctattgaggagtctttacagcaaattaagattcagatgccttgctaagtctagagttctagagttatgtttcagaaagtctaagaaacccacctcttgagaggtcagtaaagaggacttaatatttcatatctacaaaatgaccacaggattggatacagaacgagagttatcctggataactcagagctgagtacctgcccgggggccgctcgaa

SEQ ID NO: 44 - DNA, 852 bp, Homo sapien
  misc_feature (1)...(852): n = A,T,C or G
acataaatatcagagaaaagtagtctttgaaatatttacgtccaggagttctttgtttctgattatttggtgtgtgttttggtttgtgtccaaagtattggcagcttcagttttcattttctctccatcctcgggcattcttcccaaatttatataccagtcttcgtccatccacacgctccagaatttctcttttgtagtaatatctcatagctcggctgagcttttcataggtcatgctgctgttgttcttctttttaccccatagctgagccactgcctctgatttcaagaacctgaagacgccctcagatcggtcttcccattttattaatcctgggttcttgtctgggttcaagaggatgtcgcggatgaattcccataagtgagtccctctcgggttgtgctttttggtgtggcacttggcaggggggtcttgctcctttttcatatcaggtgactctgcaacaggaaggtgactggtggttgtcatggagatctgagcccggcagaaagttttgctgtccaacaaatctactgtgctaccatagttggtgtcatataaatagttctngtctttccaggtgttcatgatggaaggctcagtttgttcagtcttgacaatgacattgtgtgtggactggaacaggtcactactgcactggccgttccacttcagatgctgcaagttgctgtagaggagntgccccgccgtccctgccgcccgggtgaactcctgcaaactcatgctgcaaaggtgctcgccgttgatgtcgaactcntggaaagggatacaattggcatccagctggttggtgtccaggaggtgatggagccactcccacacctggt

SEQ ID NO: 45 - DNA, 234 bp, Homo sapien
acaacagacccttgctcgctaacgacctcatgctcatcaagttggacgaatccgtgtccgagtctgacaccatccggagcatcagcattgcttcgcagtgccctaccgcggggaactcttgcctcgtttctggctggggtctgctggcgaacggcagaatgcctaccgtgctgcagtgcgtgaacgtgtcggtggtgtctgaggaggtctgcagtaagctctatgacccgctgt

SEQ ID NO: 46 - DNA, 590 bp, Homo sapien
  misc_feature (1)...(590): n = A,T,C or G
actttttatttaaatgtttataaggcagatctatgagaatgatagaaaacatggtgtgtaatttgatagcaatattttggagattacagagttttagtaattaccaattacacagttaaaaagaagataatatattccaagcanatacaaaatatctaatgaaagatcaaggcaggaaaatgantataactaattgacaatggaaaatcaattttaatgtgaattgcacattatcctttaaaagctttcaaaanaaanaattattgcagtctanttaattcaaacagtgttaaatggtatcaggataaanaactgaagggcanaaagaattaattttcacttcatgtaacncacccanatttacaatggcttaaatgcanggaaaaagcagtggaagtagggaagtantcaaggtctttctggtctctaatctgccttactctttgggtgtggctttgatcctctggagacagctgccagggctcctgttatatccacaatcccagcagcaagatgaagggatgaaaaaggacacatgctgccttcctttgaggagacttcatctcactggccaacactcagtcacatgt

SEQ ID NO: 47 - DNA, 774 bp, Homo sapien
  misc_feature (1)...(774): n = A,T,C or G
acaagggggcataatgaaggagtgggganagattttaaagaaggaaaaaaaacgaggccctgaacagaattttcctgnacaacggggcttcaaaataattttcttggggaggttcaagacgcttcactgcttgaaacttaaatggatgtgggacanaattttctgtaatgaccctgagggcattacagacgggactctgggaggaaggataaacagaaaggggacaaaggctaatcccaaaacatcaaagaaaggaaggtggcgtcatacctcccagcctacacagttctccagggctctcctcatccctggaggacgacagtggaggaacaactgaccatgtccccaggctcctgtgtgctggctcctggtcttcagcccccagctctggaagcccaccctctgctgatcctgcgtggcccacactccttgaacacacatccccaggttatattcctggacatggctgaacctcctattcctacttccgagatgccttgctccctgcagcctgtcaaaatcccactcaccctccaaaccacggcatgggaagcctttctgacttgcctgattactccagcatcttggaacaatccctgattccccactccttagaggcaagatagggtggttaagagtagggctggaccacttggagccaggctgctggcttcaaattntggctcatttacgagctatgggaccttgggcaagtnatcttcacttctatgggcntcattttgttctacctgcaaaatgggggataataatagt

SEQ ID NO: 48 - DNA, 124 bp, Homo sapien
  misc_feature (1)...(124): n = A,T,C or G
canaaattgaaattttataaaaaggcatttttctcttatatccataaaatgatataatttttgcaantatanaaatgtgtcataaattataatgttccttaattacagctcaacgcaacttggt

SEQ ID NO: 49 - DNA, 147 bp, Homo sapien
  misc_feature (1)...(147): n = A,T,C or G
gccgatgctactattttattgcaggaggtgggggtgtttttattattctctcaacagctttgtggctacaggtggtgtctgactgcatnaaaaanttttttacgggtgattgcaaaaattttagggcacccatatcccaagcantgt

SEQ ID NO: 50 - DNA, 107 bp, Homo sapien
acattaaattaataaaaggactgttggggttctgctaaaacacatggcttgatatattgcatggtttgaggttaggaggagttaggcatatgttttgggagaggggt

SEQ ID NO: 51 - DNA, 204 bp, Homo sapien
gtcctaggaagtctaggggacacacgactctggggtcacggggccgacacacttgcacggcgggaaggaaaggcagagaagtgacaccgtcagggggaaatgacagaaaggaaaatcaaggccttgcaaggtcagaaaggggactcagggcttccaccacagccctgccccacttggccacctcccttttgggaccagcaatgt

SEQ ID NO: 52 - DNA, 491 bp, Homo sapien
  misc_feature (1)...(491): n = A,T,C or G
acaaagataacatttatcttataacaaaaatttgatagttttaaaggttagtattgtgtagggtattttccaaaagactaaagagataactcaggtaaaaagttagaaatgtataaaacaccatcagacaggtttttaaaaaacaacatattacaaaattagacaatcatccttaaaaaaaaaacttcttgtatcaatttcttttgttcaaaatgactgacttaantatttttaaatatttcanaaacacttcctcaaaaattttcaanatggtagctttcanatgtnccctcagtcccaatgttgctcagataaataaatctcgtgagaacttaccacccaccacaagctttctggggcatgcaacagtgtcttttctttnctttttctttttttttttttacaggcacagaaactcatcaattttatttggataacaaagggtctccaaattatattgaaaaataaatccaagttaatatcactcttgt

SEQ ID NO: 53 - DNA, 484 bp, Homo sapien
  misc_feature (1)...(484): n = A,T,C or G
acataatttagcagggctaattaccataagatgctatttattaanaggtntatgatctgagtattaacagttgctgaagtttggtatttttatgcagcattttctttttgctttgataacactacagaacccttaaggacactgaaaattagtaagtaaagttcagaaacattagctgctcaatcaaatctctacataacactatagtaattaaaacgttaaaaaaaagtgttgaaatctgcactagtatanaccgctcctgtcaggataanactgctttggaacagaaagggaaaaancagctttgantttctttgtgctgatangaggaaaggctgaattaccttgttgcctctccctaatgattggcaggtcnggtaaatnccaaaacatattccaactcaacacttcttttccncgtancttgantctgtgtattccaggancaggcggatggaatgggccagcccncggatgttccant

SEQ ID NO: 54 - DNA, 151 bp, Homo sapien
actaaacctcgtgcttgtgaactccatacagaaaacggtgccatccctgaacacggctggccactgggtatactgctgacaaccgcaacaacaaaaacacaaatccttggcactggctagtctatgtcctctcaagtgcctttttgtttgt

SEQ ID NO: 55 - DNA, 91 bp, Homo sapien
acctggcttgtctccgggtggttcccggcgccccccacggtccccagaacggacactttcgccctccagtggatactcgagccaaagtggt

SEQ ID NO: 56 - DNA, 133 bp, Homo sapien
ggcggatgtgcgttggttatatacaaatatgtcattttatgtaagggacttgagtatacttggatttttggtatctgtgggttggggggacggtccaggaaccaataccccatggataccaagggacaactgt

SEQ ID NO: 57 - DNA, 147 bp, Homo sapien
  misc_feature (1)...(147): n = A,T,C or G
actctggagaacctgagccgctgctccgcctctgggatgaggtgatgcangcngtggcgcgactgggagctgagcccttccctttgcgcctgcctcagaggattgttgccgacntgcanatctcantgggctggatncatgcagggt

SEQ ID NO: 58 - DNA, 198 bp, Homo sapien
  misc_feature (1)...(198): n = A,T,C or G
acagggatataggtttnaagttattgtnattgtaaaatacattgaattttctgtatactctgattacatacatttatcctttaaaaaagatgtaaatcttaatttttatgccatctattaatttaccaatgagttaccttgtaaatgagaagtcatgatagcactgaattttaactagttttgacttctaagtttggt

SEQ ID NO: 59 - DNA, 330 bp, Homo sapien
acaacaaatgggttgtgaggaagtcttatcagcaaaactggtgatggctactgaaaagatccattgaaaattatcattaatgattttaaatgacaagttatcaaaaactcactcaattttcacctgtgctagcttgctaaaatgggagttaactctagagcaaatatagtatcttctgaatacagtcaataaatgacaaagccagggcctacaggtggtttccagactttccagacccagcagaaggaatctattttatcacatggatctccgtctgtgctcaaaatacctaatgatatttttcgtctttattggacttctttgaagagt

SEQ ID NO: 60 - DNA, 175 bp, Homo sapien
accgtgggtgccttctacattcctgacggctccttcaccaacatctggttctacttcggcgtcgtgggctccttcctcttcatcctcatccagctggtgctgctcatcgactttgcgcactcctggaaccagcggtggctgggcaaggccgaggagtgcgattcccgtgcctggt

SEQ ID NO: 61 - DNA, 154 bp, Homo sapien
accccacttttcctcctgtgagcagtctggacttctcactgctacatgatgagggtgagtggttgttgctcttcaacagtatcctcccctttccggatctgctgagccggacagcagtgctggactgcacagccccggggctccacattgctgt

SEQ ID NO: 62 - DNA, 30 bp, Homo sapien
cgctcgagccctatagtgagtcgtattaga

SEQ ID NO: 63 - DNA, 89 bp, Homo sapien
acaagtcatttcagcaccctttgctcttcaaaactgaccatcttttatatttaatgcttcctgtatgaataaaaatggttatgtcaagt

SEQ ID NO: 64 - DNA, 97 bp, Homo sapien
accggagtaactgagtcgggacgctgaatctgaatccaccaataaataaaggttctgcagaatcagtgcatccaggattggtccttggatctggggt

SEQ ID NO: 65 - DNA, 377 bp, Homo sapien
  misc_feature (1)...(377): n = A,T,C or G
acaacaanaantcccttctttaggccactgatggaaacctggaacccccttttgatggcagcatggcgtcctaggccttgacacagcggctggggtttgggctntcccaaaccgcacaccccaaccctggtctacccacanttctggctatgggctgtctctgccactgaacatcagggttcggtcataanatgaaatcccaanggggacagaggtcagtagaggaagctcaatgagaaaggtgctgtttgctcagccagaaaacagctgcctggcattcgccgctgaactatgaacccgtgggggtgaactacccccangaggaatcatgcctgggcgatgcaanggtgccaacaggaggggcgggaggagcatgt

SEQ ID NO: 66 - DNA, 305 bp, Homo sapien
acgcctttccctcagaattcagggaagagactgtcgcctgccttcctccgttgttgcgtgagaacccgtgtgccccttcccaccatatccaccctcgctccatctttgaactcaaacacgaggaactaactgcaccctggtcctctccccagtccccagttcaccctccatccctcaccttcctccactctaagggatatcaacactgcccagcacaggggccctgaatttatgtggtttttatatattttttaataagatgcactttatgtcattttttaataaagtctgaagaattactgttt

SEQ ID NO: 67 - DNA, 385 bp, Homo sapien
actacacacactccacttgcccttgtgagacactttgtcccagcactttaggaatgctgaggtcggaccagccacatctcatgtgcaagattgcccagcagacatcaggtctgagagttccccttttaaaaaaggggacttgcttaaaaaagaagtctagccacgattgtgtagagcagctgtgctgtgctggagattcacttttgagagagttctcctctgagacctgatctttagaggctgggcagtcttgcacatgagatggggctggtctgatctcagcactccttagtctgcttgcctctcccagggccccagcctggccacacctgcttacagggcactctcagatgcccataccatagtttctgtgctagtggaccgt

SEQ ID NO: 68 - DNA, 73 bp, Homo sapien
acttaaccagatatatttttaccccagatggggatattctttgtaaaaaatgaaaataaagtttttttaatgg

SEQ ID NO: 69 - DNA, 536 bp, Homo sapien
  misc_feature (1)...(536): n = A,T,C or G
actagtccagtgtggtggaattccattgtgttgggggctctcaccctcctctcctgcagctccagctttgtgctctgcctctgaggagaccatggcccagcatctgagtaccctgctgctcctgctggccaccctagctgtggccctggcctggagccccaaggaggaggataggataatcccgggtggcatctataacgcagacctcaatgatgagtgggtacagcgtgcccttcacttcgccatcagcgagtataacaaggccaccaaagatgactactacagacgtccgctgcgggtactaagagccaggcaacagaccgttgggggggtgaattacttcttcgacgtagaggtgggccgaaccatatgtaccaagtcccagcccaacttggacacctgtgccttccatgaacagccagaactgcagaagaaacagttgtgctctttcgagatctacgaagttccctggggagaacagaangtccctgggtgaaatccaggtgtcaagaaatcctanggatctgttgccaggc

SEQ ID NO: 70 - DNA, 477 bp, Homo sapien
atgacccctaacaggggccctctcagccctcctaatgacctccggcctagccatgtgatttcacttccactccataacgctcctcatactaggcctactaaccaacacactaaccatataccaatgatggcgcgatgtaacacgagaaagcacataccaaggccaccacacaccacctgtccaaaaaggccttcgatacgggataatcctatttattacctcagaagtttttttcttcgcagggatttttctgagccttttaccactccagcctagcccctaccccccaactaggagggcactggcccccaacaggcatcaccccgctaaatcccctagaagtcccactcctaaacacatccgtattactcgcatcaggagtatcaatcacctgagctcaccatagtctaatagaaaacaaccgaaaccaaattattcaaagcactgcttattacaattttactgggtctctatttt

SEQ ID NO: 71 - DNA, 533 bp, Homo sapien
  misc_feature (1)...(533): n = A,T,C or G
agagctataggtacagtgtgatctcagctttgcaaacacattttctacatagatagtactaggtattaatagatatgtaaagaaagaaatcacaccattaataatggtaagattggtttatgtgattttagtggtatttttggcacccttatatatgttttccaaactttcagcagtgatattatttccataacttaaaaagtgagtttgaaaaagaaaatctccagcaagcatctcatttaaataaaggtttgtcatctttaaaaatacagcaatatgtgactttttaaaaaagctgtcaaataggtgtgaccctactaataattattagaaatacatttaaaaacatcgagtacctcaagtcagtttgccttgaaaaatatcaaatataactcttagagaaatgtacataaaagaatgcttcgtaattttggagtangaggttccctcctcaattttgtatttttaaaaagtacatggtaaaaaaaaaaattcacaacagtatataaggctgtaaaatgaagaattctgcc

SEQ ID NO: 72 - DNA, 511 bp, Homo sapien
  misc_feature (1)...(511): n = A,T,C or G
tattacggaaaaacacaccacataattcaactancaaagaanactgcttcagggcgtgtaaaatgaaaggcttccaggcagttatctgattaaagaacactaaaagagggacaaggctaaaagccgcaggatgtctacactatancaggcgctatttgggttggctggaggagctgtggaaaacatgganagattggtgctgganatcgccgtggctattcctcattgttattacanagtgaggttctctgtgtgcccactggtttgaaaaccgttctncaataatgatagaatagtacacacatgagaactgaaatggcccaaacccagaaagaaagcccaactagatcctcagaanacgcttctagggacaataaccgatgaagaaaagatggcctccttgtgcccccgtctgttatgatttctctccattgcagcnanaaacccgttcttctaagcaaacncaggtgatgatggcnaaaatacaccccctcttgaagnaccnggagga

SEQ ID NO: 73 - DNA, 499 bp, Homo sapien
  misc_feature (1)...(499): n = A,T,C or G
cagtgccagcactggtgccagtaccagtaccaataacagtgccagtgccagtgccagcaccagtggtggcttcagtgctggtgccagcctgaccgccactctcacatttgggctcttcgctggccttggtggagctggtgccagcaccagtggcagctctggtgcctgtggtttctcctacaagtgagattttagatattgttaatcctgccagtctttctcttcaagccagggtgcatcctcagaaacctactcaacacagcactctaggcagccactatcaatcaattgaagttgacactctgcattaaatctatttgccatttctgaaaaaaaaaaaaaaaaaagggcggccgctcgantctagagggcccgtttaaacccgctgatcagcctcgactgtgccttctanttgccagccatctgttgtttgcccctcccccgntgccttccttgaccctggaaagtgccactcccactgtcctttcctaantaaaat

SEQ ID NO: 74 - DNA, 537 bp, Homo sapien
  misc_feature (1)...(537): n = A,T,C or G
tttcataggagaacacactgaggagatacttgaagaatttggattcagccgcgaagagatttatcagcttaactcagataaaatcattgaaagtaataaggtaaaagctagtctctaacttccaggcccacggctcaagtgaatttgaatactgcatttacagtgtagagtaacacataacattgtatgcatggaaacatggaggaacagtattacagtgtcctaccactctaatcaagaaaagaattacagactctgattctacagtgatgattgaattctaaaaatggtaatcattagggcttttgatttataanactttgggtacttatactaaattatggtagttatactgccttccagtttgcttgatatatttgttgatattaagattcttgacttatattttgaatgggttctactgaaaaangaatgatatattcttgaagacatcgatatacatttatttacactcttgattctacaatgtagaaaatgaaggaaatgccccaaattgtatggtgataaaagtcccgt

SEQ ID NO: 75 - DNA, 467 bp, Homo sapien
  misc_feature (1)...(467): n = A,T,C or G
caaanacaattgttcaaaagatgcaaatgatacactactgctgcagctcacaaacacctctgcatattacacgtacctcctcctgctcctcaagtagtgtggtctattttgccatcatcacctgctgtctgcttagaagaacggctttctgctgcaanggagagaaatcataacagacggtggcacaaggaggccatcttttcctcatcggttattgtccctagaagcgtcttctgaggatctagttgggctttctttctgggtttgggccatttcanttctcatgtgtgtactattctatcattattgtataacggttttcaaaccngtgggcacncagagaacctcactctgtaataacaatgaggaatagccacggtgatctccagcaccaaatctctccatgttnttccagagctcctccagccaacccaaatagccgctgctatngtgtagaacatccctgn

SEQ ID NO: 76 - DNA, 400 bp, Homo sapien
  misc_feature (1)...(400): n = A,T,C or G
aagctgacagcattcgggccgagatgtctcgctccgtggccttagctgtgctcgcgctactctctctttctggcctggaggctatccagcgtactccaaagattcaggtttactcacgtcatccagcagagaatggaaagtcaaatttcctgaattgctatgtgtctgggtttcatccatccgacattgaagttgacttactgaagaatggagagagaattgaaaaagtggagcattcagacttgtctttcagcaaggactggtctttctatctcttgtactacactgaattcacccccactgaaaaagatgagtatgcctgccgtgtgaaccatgtgactttgtcacagcccaagatngttnagtgggatcganacatgtaagcagcancatgggaggt

SEQ ID NO: 77 - DNA, 248 bp, Homo sapien
ctggagtgccttggtgtttcaagcccctgcaggaagcagaatgcaccttctgaggcacctccagctgccccggcgggggatgcgaggctcggagcacccttgcccggctgtgattgctgccaggcactgttcatctcagcttttctgtccctttgctcccggcaagcgcttctgctgaaagttcatatctggagcctgatgtcttaacgaataaaggtcccatgctccacccgaaaaaaaaaaaaaaa

SEQ ID NO: 78 - DNA, 201 bp, Homo sapien
actagtccagtgtggtggaattccattgtgttgggcccaacacaatggctacctttaacatcacccagaccccgccctgcccgtgccccacgctgctgctaacgacagtatgatgcttactctgctactcggaaactatttttatgtaattaatgtatgctttcttgtttataaatgcctgatttaaaaaaaaaaaaaaaa

SEQ ID NO: 79 - DNA, 552 bp, Homo sapien
  misc_feature (1)...(552): n = A,T,C or G
tccttttgttaggtttttgagacaaccctagacctaaactgtgtcacagacttctgaatgtttaggcagtgctagtaatttcctcgtaatgattctgttattactttcctattctttattcctctttcttctgaagattaatgaagttgaaaattgaggtggataaatacaaaaaggtagtgtgatagtataagtatctaagtgcagatgaaagtgtgttatatatatccattcaaaattatgcaagttagtaattactcagggttaactaaattactttaatatgctgttgaacctactctgttccttggctagaaaaaattataaacaggactttgttagtttgggaagccaaattgataatattctatgttctaaaagttgggctatacataaantatnaagaaatatggaattttattcccaggaatatggggttcatttatgaatantacccggganagaagttttgantnaaaccngttttggttaatacgttaatatgtcctnaatnaacaaggcntgacttatttccaaaaaaaaaaaaaaaaa

SEQ ID NO: 80 - DNA, 476 bp, Homo sapien
  misc_feature (1)...(476): n = A,T,C or G
acagggatttgagatgctaaggccccagagatcgtttgatccaaccctcttattttcagaggggaaaatggggcctagaagttacagagcatctagctggtgcgctggcacccctggcctcacacagactcccgagtagctgggactacaggcacacagtcactgaagcaggccctgtttgcaattcacgttgccacctccaacttaaacattcttcatatgtgatgtccttagtcactaaggttaaactttcccacccagaaaaggcaacttagataaaatcttagagtactttcatactcttctaagtcctcttccagcctcactttgagtcctccttgggggttgataggaantntctcttggctttctcaataaaatctctatccatctcatgtttaatttggtacgcntaaaaatgctgaaaaaattaaaatgttctggtttcnctttaaaaaaaaaaaaaaaaaaaaaaa

SEQ ID NO: 81 - DNA, 232 bp, Homo sapien
  misc_feature (1)...(232): n = A,T,C or G
tttttttttgtatgccntcnctgtggngttattgttgctgccaccctggaggagcccagtttcttctgtatctttcttttctgggggatcttcctggctctgcccctccattcccagcctctcatccccatcttgcacttttgctagggttggaggcgctttcctggtagcccctcagagactcagtcagcgggaataagtcctaggggtggggggtgtggcaagccggcct

SEQ ID NO: 82 - DNA, 383 bp, Homo sapien
  misc_feature (1)...(383): n = A,T,C or G
aggcgggagcagaagctaaagccaaagcccaagaagagtggcagtgccagcactggtgccagtaccagtaccaataacatgccagtgccagtgccagcaccagtggtggcttcagtgctggtgccagcctgaccgccactctcacatttgggctcttcgctggccttggtggagctggtgccagcaccagtggcagctctggtgcctgtggtttctcctacaagtgagattttagatattgttaatcctgccagtctttctcttcaagccagggtgcatcctcagaaacctactcaacacagcactctnggcagccactatcaatcaattgaagttgacactctgcattaaatctatttgccatttcaaaaaaaaaaaaaaaa

SEQ ID NO: 83 - DNA, 494 bp, Homo sapien
  misc_feature (1)...(494): n = A,T,C or G
accgaattgggaccgctggcttataagcgatcatgtcctccagtattacctcaacgagcagggagatcgagtctatacgctgaagaaatttgacccgatgggacaacagacctgctcagcccatcctgctcggttctccccagatgacaaatactctcgacaccgaatcaccatcaagaaacgcttcaaggtgctcatgacccagcaaccgcgccctgtcctctgagggtccttaaactgatgtcttttctgccacctgttacccctcggagactccgtaaccaaactcttcggactgtgagccctgatgcctttttgccagccatactctttggcntccagtctctcgtggcgattgattatgcttgtgtgaggcaatcatggtggcatcacccatnaagggaacacatttganttttttttcncatattttaaattacnaccagaatanttcagaataaatgaattgaaaaactcttaaaaaaaaaaaaaaa

SEQ ID NO: 84 - DNA, 380 bp, Homo sapien
  misc_feature (1)...(380): n = A,T,C or G
gctggtagcctatggcgtggccacggangggctcctgaggcacgggacagtgacttcccaagtatcctgcgccgcgtcttctaccgtccctacctgcagatcttcgggcagattccccaggaggacatggacgtggccctcatggagcacagcaactgctcgtcggagcccggcttctgggcacaccctcctggggcccaggcgggcacctgcgtctcccagtatgccaactggctggtggtgctgctcctcgtcatcttcctgctcgtggccaacatcctgctggtcacttgctcattgccatgttcagttacacattcggcaaagtacagggcaacagcnatctctactgggaaggccagcgttnccgcctcatccgg

SEQ ID NO: 85 - DNA, 481 bp, Homo sapien
  misc_feature (1)...(481): n = A,T,C or G
gagttagctcctccacaaccttgatgaggtcgtctgcagtggcctctcgcttcataccgctnccatcgtcatactgtaggtttgccaccacctcctgcatcttggggcggctaatatccaggaaactctcaatcaagtcaccgtcnatnaaacctgtggctggttctgtcttccgctcggtgtgaaaggatctccagaaggagtgctcgatcttccccacacttttgatgactttattgagtcgattctgcatgtccagcaggaggttgtaccagctctctgacagtgaggtcaccagccctatcatgccnttgaacgtgccgaagaacaccgagccttgtgtggggggtgnagtctcacccagattctgcattaccaganagccgtggcaaaaganattgacaactcgcccaggnngaaaaagaacacctcctggaagtgctngccgctcctcgtccnttggtggnngcgcntncctttt

SEQ ID NO: 86 - DNA, 472 bp, Homo sapien
  misc_feature (1)...(472): n = A,T,C or G
aacatcttcctgtataatgctgtgtaatatcgatccgatnttgtctgctgagaattcattacttggaaaagcaacttnaagcctggacactggtattaaaattcacaatatgcaacactttaaacagtgtgtcaatctgctcccttactttgtcatcaccagtctgggaataagggtatgccctattcacacctgttaaaagggcgctaagcatttttgattcaacatctttttttttgacacaagtccgaaaaaagcaaaagtaaacagttnttaatttgttagccaattcactttcttcatgggacagagccatttgatttaaaaagcaaattgcataatattgagctttgggagctgatatntgagcggaagantagcctttctacttcaccagacacaactcctttcatattgggatgttnacnaaagttatgtctcttacagatgggatgcttttgtggcaattctg

SEQ ID NO: 87 - DNA, 413 bp, Homo sapien
  misc_feature (1)...(413): n = A,T,C or G
agaaaccagtatctctnaaaacaacctctcataccttgtggacctaattttgtgtgcgtgtgtgtgtgcgcgcatattatatagacaggcacatcttttttacttttgtaaaagcttatgcctctttggtatctatatctgtgaaagttttaatgatctgccataatgtcttggggacctttgtcttctgtgtaaatggtactagagaaaacacctatnttatgagtcaatctagttngttttattcgacatgaaggaaatttccagatnacaacactnacaaactctcccttgactaggggggacaaagaaaagcanaactgaacatnagaaacaattncctggtgagaaattncataaacagaaattgggtngtatattgaaananngcatcattnaaacgtttttttttt

SEQ ID NO: 88 - DNA, 448 bp, Homo sapien
  misc_feature (1)...(448): n = A,T,C or G
cgcagcgggtcctctctatctagctccagcctctcgcctgccccactccccgcgtcccgcgtcctagccnaccatggccgggcccctgcgcgccccgctgctcctgctggccatcctggccgtggccctggccgtgagccccgcggccggctccagtcccggcaagccgccgcgcctggtgggaggcccatggaccccgcgtggaagaagaaggtgtgcggcgtgcactggactttgccgtcggcnantacaacaaacccgcaacnacttttaccnagcncgcgctgcaggttgtgccgccccaancaaattgttactnggggtaantaattcttggaagttgaacctgggccaaacnngtttaccagaaccnagccaattngaacaattncccctccataacagccccttttaaaaagggaancantcctgntcttttccaaatttt

SEQ ID NO: 89 - DNA, 463 bp, Homo sapien
  misc_feature (1)...(463): n = A,T,C or G
gaattttgtgcactggccactgtgatggaaccattgggccaggatgctttgagtttatcagtagtgattctgccaaagttggtgttgtaacatgagtatgtaaaatgtcaaaaaattagcagaggtctaggtctgcatatcagcagacagtttgtccgtgtattttgtagccttgaagttctcagtgacaagttnnttctgatgcgaagttctnattccagtgttttagtcctttgcatctttnatgttnagacttgcctctntnaaattgcttttgtnttctgcaggtactatctgtggtttaacaaaatagaannacttctctgcttngaanatttgaatatcttacatctnaaaatnaattctctccccatannaaaacccangcccttggganaatttgaaaaanggntccttcnnaattcnnanaanttcagntntcatacaacanaacnggancccc

SEQ ID NO: 90 - DNA, 400 bp, Homo sapien
  misc_feature (1)...(400): n = A,T,C or G
agggattgaaggtctnttntactgtcggactgttcanccaccaactctacaagttgctgtcttccactcactgtctgtaagcntnttaacccagactgtatcttcataaatagaacaaattcttcaccagtcacatcttctaggacctttttggattcagttagtataagctcttccacttcctttgttaagacttcatctggtaaagtcttaagttttgtagaaaggaatttaattgctcgttctctaacaatgtcctctccttgaagtatttggctgaacaacccacctnaagtccctttgtgcatccattttaaatatacttaatagggcattggtncactaggttaaattctgcaagagtcatctgtctgcaaaagttgcgttagtatatctgcca

SEQ ID NO: 91 - DNA, 480 bp, Homo sapien
  misc_feature (1)...(480): n = A,T,C or G
gagctcggatccaataatctttgtctgagggcagcacacatatncagtgccatggnaactggtctaccccacatgggagcagcatgccgtagntatataaggtcattccctgagtcagacatgcctctttgactaccgtgtgccagtgctggtgattctcacacacctccnnccgctctttgtggaaaaactggcacttgnctggaactagcaagacatcacttacaaattcacccacgagacacttgaaaggtgtaacaaagcgactcttgcattgctttttgtccctccggcaccagttgtcaatactaacccgctggtttgcctccatcacatttgtgatctgtagctctggatacatctcctgacagtactgaagaacttcttcttttgtttcaaaagcaactcttggtgcctgttngatcaggttcccatttcccagtccgaatgttcacatggcatatnttacttcccacaaaa

SEQ ID NO: 92 - DNA, 477 bp, Homo sapien
  misc_feature (1)...(477): n = A,T,C or G
atacagcccanatcccaccacgaagatgcgcttgttgactgagaacctgatgcggtcactggtcccgctgtagccccagcgactctccacctgctggaagcggttgatgctgcactccttcccacgcaggcagcagcggggccggtcaatgaactccactcgtggcttggggttgacggttaantgcaggaagaggctgaccacctcgcggtccaccaggatgcccgactgtgcgggacctgcagcgaaactcctcgatggtcatgagcgggaagcgaatgangcccagggccttgcccagaaccttccgcctgttctctggcgtcacctgcagctgctgccgctnacactcggcctcggaccagcggacaaacggcgttgaacagccgcacctcacggatgcccantgtgtcgcgctccaggaacggcnccagcgtgtccaggtcaatgtcggtgaancctccgcgggtaatggcg

SEQ ID NO: 93 - DNA, 377 bp, Homo sapien
  misc_feature (1)...(377): n = A,T,C or G
gaacggctggaccttgcctcgcattgtgctgctggcaggaataccttggcaagcagctccagtccgagcagccccagaccgctgccgcccgaagctaagcctgcctctggccttcccctccgcctcaatgcagaaccantagtgggagcactgtgtttagagttaagagtgaacactgtntgattttacttgggaatttcctctgttatatagcttttcccaatgctaatttccaaacaacaacaacaaaataacatgtttgcctgttnagttgtataaaagtangtgattctgtatntaaagaaaatattactgttacatatactgcttgcaanttctgtatttattggtnctctggaaataaatatattattaaa

SEQ ID NO: 94 - DNA, 495 bp, Homo sapien
  misc_feature (1)...(495): n = A,T,C or G
ccctttgaggggttagggtccagttcccagtggaagaaacaggccaggagaantgcgtgccgagctgangcagatttcccacagtgaccccagagccctgggctatagtctctgacccctccaaggaaagaccaccttctggggacatgggctggagggcaggacctagaggcaccaagggaaggccccattccggggctgttccccgaggaggaagggaaggggctctgtgtgccccccacgaggaanaggccctgantcctgggatcanacaccccttcacgtgtatccccacacaaatgcaagctcaccaaggtcccctctcagtcccttccctacaccctgaacggncactggcccacacccacccagancanccacccgccatggggaatgtnctcaaggaatcgcngggcaacgtggactctngtcccnnaagggggcagaatctccaatagangganngaacccttgctnanaaaaaaaaanaaaaaa

SEQ ID NO: 95 - DNA, 472 bp, Homo sapien
  misc_feature (1)...(472): n = A,T,C or G
ggttacttggtttcattgccaccacttagtggatgtcatttagaaccattttgtctgctccctctggaagccttgcgcagagcggactttgtaattgttggagaataactgctgaatttttagctgttttgagttgattcgcaccactgcaccacaactcaatatgaaaactatttnacttatttattatcttgtgaaaagtatacaatgaaaattttgttcatactgtatttatcaagtatgatgaaaagcaatagatatatattcttttattatgttnaattatgattgccattattaatcggcaaaatgtggagtgtatgttcttttcacagtaatatatgccttttgtaacttcacttggttattttattgtaaatgaattacaaaattcttaatttaagaaaatggtangttatatttanttcantaatttctttccttgtttacgttaattttgaaaagaatgcat

SEQ ID NO: 96 - DNA, 476 bp, Homo sapien
  misc_feature (1)...(476): n = A,T,C or G
ctgaagcatttcttcaaacttntctacttttgtcattgatacctgtagtaagttgacaatgtggtgaaatttcaaaattatatgtaacttctactagttttactttctcccccaagtcttttttaactcatgatttttacacacacaatccagaacttattatatagcctctaagtctttattcttcacagtagatgatgaaagagtcctccagtgtcttgngcanaatgttctagntatagctggatacatacngtgggagttctataaactcatacctcagtgggactnaaccaaaattgtgttagtctcaattcctaccacactgagggagcctcccaaatcactatattcttatctgcaggtactcctccagaaaaacngacagggcaggcttgcatgaaaaagtnacatctgcgttacaaagtctatcttcctcanangtctgtnaaggaacaatttaatcttctagcttt

SEQ ID NO: 97 - DNA, 479 bp, Homo sapien
  misc_feature (1)...(479): n = A,T,C or G
actctttctaatgctgatatgatcttgagtataagaatgcatatgtcactagaatggataaaataatgctgcaaacttaatgttcttatgcaaaatggaacgctaatgaaacacagcttacaatcgcaaatcaaaactcacaagtgctcatctgttgtagatttagtgtaataagacttagattgtgctccttcggatatgattgtttctcanatcttgggcaatnttccttagtcaaatcaggctactagaattctgttattggatatntgagagcatgaaatttttaanaatacacttgtgattatnaaattaatcacaaatttcacttatacctgctatcagcagctagaaaaacatntnntttttanatcaaagtattttgtgtttggaantgtnnaaatgaaatctgaatgtgggttcnatcttattttttcccngacnactanttncttttttagggnctattctganccatc

SEQ ID NO: 98 - DNA, 461 bp, Homo sapien
agtgacttgtcctccaacaaaaccccttgatcaagtttgtggcactgacaatcagacctatgctagttcctgtcatctattcgctactaaatgcagactggaggggaccaaaaaggggcatcaactccagctggattattttggagcctgcaaatctattcctacttgtacggactttgaagtgattcagtttcctctacggatgagagactggctcaagaatatcctcatgcagctttatgaagccactctgaacacgctggttatctagatgagaacagagaaataaagtcagaaaatttacctggagaaaagaggctttggctggggaccatcccattgaaccttctcttaaggactttaagaaaaactaccacatgttgtgtatcctggtgccggccgtttatgaactgaccaccctttggaataatcttgacgctcctgaacttgctcctctgcga

SEQ ID NO: 99 - DNA, 171 bp, Homo sapien
gtggccgcgcgcaggtgtttcctcgtaccgcagggccccctcccttccccaggcgtccctcggcgcctctgcgggcccgaggaggagcggctggcgggtggggggagtgtgacccaccctcggtgagaaaagccttctctagcgatctgagaggcgtgccttgggggtacc

SEQ ID NO: 100 - DNA, 269 bp, Homo sapien
cggccgcaagtgcaactccagctggggccgtgcggacgaagattctgccagcagttggtccgactgcgacgacggcggcggcgacagtcgcaggtgcagcgcgggcgcctggggtcttgcaaggctgagctgacgccgcagaggtcgtgtcacgtcccacgaccttgacgccgtcggggacagccggaacagagcccggtgaagcgggaggcctcggggagcccctcgggaagggcggcccgagagatacgcaggtgcaggtggccgcc

SEQ ID NO: 101 - DNA, 405 bp, Homo sapien
ttttttttttttttggaatctactgcgagcacagcaggtcagcaacaagtttattttgcagctagcaaggtaacagggtagggcatggttacatgttcaggtcaacttcctttgtcgtggttgattggtttgtctttatgggggcggggtggggtaggggaaacgaagcaaataacatggagtgggtgcaccctccctgtagaacctggttacaaagcttggggcagttcacctggtctgtgaccgtcattttcttgacatcaatgttattagaagtcaggatatcttttagagagtccactgttctggagggagattagggtttcttgccaaatccaacaaaatccactgaaaaagttggatgatcagtacgaataccgaggcatattctcatatcggtggcca

SEQ ID NO: 102 - DNA, 470 bp, Homo sapien
ttttttttttttttttttttttttttttttttttttttttttttttttttttttttttttggcacttaatccatttttatttcaaaatgtctacaaatttaatcccattatacggtattttcaaaatctaaattattcaaattagccaaatccttaccaaataatacccaaaaatcaaaaatatacttctttcagcaaacttgttacataaattaaaaaaatatatacggctggtgttttcaaagtacaattatcttaacactgcaaacattttaaggaactaaaataaaaaaaaacactccgcaaaggttaaagggaacaacaaattcttttacaacaccattataaaaatcatatctcaaatcttaggggaatatatacttcacacgggatcttaacttttactcactttgtttatttttttaaaccattgtttgggcccaacacaatggaatcccccctggactagt

SEQ ID NO: 103 - DNA, 581 bp, Homo sapien
ttttttttttttttttttgacccccctcttataaaaaacaagttaccattttattttacttacacatatttattttataattggtattagatattcaaaaggcagcttttaaaatcaaactaaatggaaactgccttagatacataattcttaggaattagcttaaaatctgcctaaagtgaaaatcttctctagctcttttgactgtaaatttttgactcttgtaaaacatccaaattcatttttcttgtctttaaaattatctaatctttccattttttccctattccaagtcaatttgcttctctagcctcatttcctagctcttatctactattagtaagtggcttttttcctaaaagggaaaacaggaagagaaatggcacacaaaacaaacattttatattcatatttctacctacgttaataaaatagcattttgtgaagccagctcaaaagaaggcttagatccttttatgtccattttagtcactaaacgatatcaaagtgccagaatgcaaaaggtttgtgaacatttattcaaaagctaatataagatatttcacatactcatctttctg

SEQ ID NO: 104 - DNA, 578 bp, Homo sapien
tttttttttttttttttttttttttctcttctttttttttgaaatgaggatcgagtttttcactctctagatagggcatgaagaaaactcatctttccagctttaaaataacaatcaaatctcttatgctatatcatattttaagttaaactaatgagtcactggcttatcttctcctgaaggaaatctgttcattcttctcattcatatagttatatcaagtactaccttgcatattgagaggtttttcttctctatttacacatatatttccatgtgaatttgtatcaaacctttattttcatgcaaactagaaaataatgtttcttttgcataagagaagagaacaatatagcattacaaaactgctcaaattgtttgttaagttatccattataattagttggcaggagctaatacaaatcacatttacgacagcaataataaaactgaagtaccagttaaatatccaaaataattaaaggaacatttttagcctgggtataattagctaattcactttacaagcatttattagaatgaattcacatgttattattcctagcccaacacaatgg

SEQ ID NO: 105 - DNA, 538 bp, Homo sapien
tttttttttttttttcagtaataatcagaacaatatttatttttatatttaaaattcatagaaaagtgccttacatttaataaaagtttgtttctcaaagtgatcagaggaattagatatgtcttgaacaccaatattaatttgaggaaaatacaccaaaatacattaagtaaattatttaagatcatagagcttgtaagtgaaaagataaaatttgacctcagaaactctgagcattaaaaatccactattagcaaataaattactatggacttcttgctttaattttgtgatgaatatggggtgtcactggtaaaccaacacattctgaaggatacattacttagtgatagattcttatgtactttgctaatacgtggatatgagttgacaagtttctctttcttcaatcttttaaggggcgagaaatgaggaagaaaagaaaaggattacgcatactgttctttctatggaaggattagatatgtttcctttgccaatattaaaaaaataataatgtttactactagtgaaaccc

SEQ ID NO: 106 - DNA, 473 bp, Homo sapien
ttttttttttttttttagtcaagtttctatttttattataattaaagtcttggtcatttcatttattagctctgcaacttacatatttaaattaaagaaacgttttagacaactgtacaatttataaatgtaaggtgccattattgagtaatatattcctccaagagtggatgtgtcccttctcccaccaactaatgaacagcaacattagtttaattttattagtagatatacactgctgcaaacgctaattctcttctccatccccatgtgatattgtgtatatgtgtgagttggtagaatgcatcacaatctacaatcaacagcaagatgaagctaggctgggctttcggtgaaaatagactgtgtctgtctgaatcaaatgatctgacctatcctcggtggcaagaactcttcgaaccgcttcctcaaaggcgctgccacatttgtggctctttgcacttgtttcaaaa

SEQ ID NO: 107 - DNA, 1621 bp, Homo sapien
cgccatggcactgcagggcatctcggtcatggagctgtccggcctggccccgggcccgttctgtgctatggtcctggctgacttcggggcgcgtgtggtacgcgtggaccggcccggctcccgctacgacgtgagccgcttgggccggggcaagcgctcgctagtgctggacctgaagcagccgcggggagccgccgtgctgcggcgtctgtgcaagcggtcggatgtgctgctggagcccttccgccgcggtgtcatggagaaactccagctgggcccagagattctgcagcgggaaaatccaaggcttatttatgccaggctgagtggatttggccagtcaggaagcttctgccggttagctggccacgatatcaactatttggctttgtcaggtgttctctcaaaaattggcagaagtggtgagaatccgtatgccccgctgaatctcctggctgactttgctggtggtggccttatgtgtgcactgggcattataatggctctttttgaccgcacacgcactgacaagggtcaggtcattgatgcaaatatggtggaaggaacagcatatttaagttcttttctgtggaaaactcagaaatcgagtctgtgggaagcacctcgaggacagaacatgttggatggtggagcacctttctatacgacttacaggacagcagatggggaattcatggctgttggagcaatagaaccccagttctacgagctgctgatcaaaggacttggactaaagtctgatgaacttcccaatcagatgagcatggatgattggccagaaatgaagaagaagtttgcagatgtatttgcaaagaagacgaaggcagagtggtgtcaaatctttgacggcacagatgcctgtgtgactccggttctgacttttgaggaggttgttcatcatgatcacaacaaggaacggggctcgtttatcaccagtgaggagcaggacgtgagcccccgccctgcacctctgctgttaaacaccccagccatcccttctttcaaaagggatcctttcataggagaacacactgaggagatacttgaagaatttggattcagccgcgaagagatttatcagcttaactcagataaaatcattgaaagtaataaggtaaaagctagtctctaacttccaggcccacggctcaagtgaatttgaatactgcatttacagtgtagagtaacacataacattgtatgcatggaaacatggaggaacagtattacagtgtcctaccactctaatcaagaaaagaattacagactctgattctacagtgatgattgaattctaaaaatggttatcattagggcttttgatttataaaactttgggtacttatactaaattatggtagttattctgccttccagtttgcttgatatatttgttgatattaagattcttgacttatattttgaatgggttctagtgaaaaaggaatgatatattcttgaagacatcgatatacatttatttacactcttgattctacaatgtagaaaatgaggaaatgccacaaattgtatggtgataaaagtcacgtgaaacaaaaaaaaaaaaaaaaaaaaaaaaaaaaaaaaaaaaaaaaaaaaa

SEQ ID NO: 108 - protein, 382 aa, Homo sapien [sequence omitted]

SEQ ID NO: 109 - DNA, 1524 bp, Homo sapien
ggcacgaggctgcgccagggcctgagcggaggcgggggcagcctcgccagcgggggccccgggcctggccatgcctcactgagccagcgcctgcgcctctacctcgccgacagctggaaccagtgcgacctagtggctctcacctgcttcctcctgggcgtgggctgccggctgaccccgggtttgtaccacctgggccgcactgtcctctgcatcgacttcatggttttcacggtgcggctgcttcacatcttcacggtcaacaaacagctggggcccaagatcgtcatcgtgagcaagatgatgaaggacgtgttcttcttcctcttcttcctcggcgtgtggctggtagcctatggcgtggccacggaggggctcctgaggccacgggacagtgacttcccaagtatcctgcgccgcgtcttctaccgtccctacctgcagatcttcgggcagattccccaggaggacatggacgtggccctcatggagcacagcaactgctcgtcggagcccggcttctgggcacaccctcctggggcccaggcgggcacctgcgtctcccagtatgccaactggctggtggtgctgctcctcgtcatcttcctgctcgtggccaacatcctgctggtcaacttgctcattgccatgttcagttacacattcggcaaagtacagggcaacagcgatctctactggaaggcgcagcgttaccgcctcatccgggaattccactctcggcccgcgctggccccgccctttatcgtcatctcccacttgcgcctcctgctcaggcaattgtgcaggcgaccccggagcccccagccgtcctccccggccctcgagcatttccgggtttacctttctaaggaagccgagcggaagctgctaacgtgggaatcggtgcataaggagaactttctgctggcacgcgctagggacaagcgggagagcgactccgagcgtctgaagcgcacgtcccagaaggtggacttggcactgaaacagctgggacacatccgcgagtacgaacagcgcctgaaagtgctggagcgggaggtccagcagtgtagccgcgtcctggggtgggtggccgaggccctgagccgctctgccttgctgcccccaggtgggccgccaccccctgacctgcctgggtccaaagactgagccctgctggcggacttcaaggagaagcccccacaggggattttgctcctagagtaaggctcatctgggcctcggcccccgcacctggtggccttgtccttgaggtgagccccatgtccatctgggccactgtcaggaccacctttgggagtgtcatccttacaaaccacagcatgcccggctcctcccagaaccagtcccagcctgggaggatcaaggcctggatcccgggccgttatccatctggaggctgcagggtccttggggtaacagggaccacagacccctcaccactcacagattcctcacactggggaaataaagccatttcagaggaaaaaaaaaaaaaaaaaa

SEQ ID NO: 110 - DNA, 3410 bp, Homo sapien
gggaaccagcctgcacgcgctggctccgggtgacagccgcgcgcctcggccaggatctgagtgatgagacgtgtccccactgaggtgccccacagcagcaggtgttgagcatgggctgagaagctggaccggcaccaaagggctggcagaaatgggcgcctggctgattcctaggcagttggcggcagcaaggaggagaggccgcagcttctggagcagagccgagacgaagcagttctggagtgcctgaacggccccctgagccctacccgcctggcccactatggtccagaggctgtgggtgagccgcctgctgcggcaccggaaagcccagctcttgctggtcaacctgctaacctttggcctggaggtgtgtttggccgcaggcatcacctatgtgccgcctctgctgctggaagtgggggtagaggagaagttcatgaccatggtgctgggcattggtccagtgctgggcctggtctgtgtcccgctcctaggctcagccagtgaccactggcgtggacgctatggccgccgccggcccttcatctgggcactgtccttgggcatcctgctgagcctctttctcatcccaagggccggctggctagcagggctgctgtgcccggatcccaggcccctggagctggcactgctcatcctgggcgtggggctgctggacttctgtggccaggtgtgcttcactccactggaggccctgctctctgacctcttccgggacccggaccactgtcgccaggcctactctgtctatgccttcatgatcagtcttgggggctgcctgggctacctcctgcctgccattgactgggacaccagtgccctggccccctacctgggcacccaggaggagtgcctctttggcctgctcaccctcatcttcctcacctgcgtagcagccacactgctggtggctgaggaggcagcgctgggccccaccgagccagcagaagggctgtcggccccctccttgtcgccccactgctgtccatgccgggcccgcttggctttccggaacctgggcgccctgcttccccggctgcaccagctgtgctgccgcatgccccgcaccctgcgccggctcttcgtggctgagctgtgcagctggatggcactcatgaccttcacgctgttttacacggatttcgtgggcgaggggctgtaccagggcgtgcccagagctgagccgggcaccgaggcccggagacactatgatgaaggcgttcggatgggcagcctggggctgttcctgcagtgcgccatctccctggtcttctctctggtcatggaccggctggtgcagcgattcggcactcgagcagtctatttggccagtgtggcagctttccctgtggctgccggtgccacatgcctgtcccacagtgtggccgtggtgacagcttcagccgccctcaccgggttcaccttctcagccctgcagatcctgccctacacactggcctccctctaccaccgggagaagcaggtgttcctgcccaaataccgaggggacactggaggtgctagcagtgaggacagcctgatgaccagcttcctgccaggccctaagcctggagctcccttccctaatggacacgtgggtgctggaggcagtggcctgctcccacctccacccgcgctctgcggggcctctgcctgtgatgtctccgtacgtgtggtggtgggtgagcccaccgaggccagggtggttccgggccggggcatctgcctggacctcgccatcctggatagtgccttcctgctgtcccaggtggccccatccctgtttatgggctccattgtccagctcagccagtctgtcactgcctatatggtgtctgccgcaggcctgggtctggtcgccatttactttgctacacaggtagtatttgacaagagcgacttggccaaatactcagcgtagaaaacttccagcacattggggtggagggcctgcctcactgggtcccagctccccgctcctgttagccccatggggctgccgggctggccgccagtttctgttgctgccaaagtaatgtggctctctgctgccaccctgtgctgctgaggtgcgtagctgcacagctgggggctggggcgtccctctcctctctccccagtctctagggctgcctgactggaggccttccaagggggtttcagtctggacttatacagggaggccagaagggctccatgcactggaatgcggggactctgcaggtggattacccaggctcagggttaacagctagcctcctagttgagacacacctagagaagggtttttgggagctgaataaactcagtcacctggtttcccatctctaagccccttaacctgcagcttcgtttaatgtagctcttgcatgggagtttctaggatgaaacactcctccatgggatttgaacatatgacttatttgtaggggaagagtcctgaggggcaacacacaagaaccaggtcccctcagcccacagcactgtctttttgctgatccacccccctcttaccttttatcaggatgtggcctgttggtccttctgttgccatcacagagacacaggcatttaaatatttaacttatttatttaacaaagtagaagggaatccattgctagcttttctgtgttggtgtctaatatttgggtagggtgggggatccccaacaatcaggtcccctgagatagctggtcattgggctgatcattgccagaatcttcttctcctggggtctggccccccaaaatgcctaacccaggaccttggaaattctactcatcccaaatgataattccaaatgctgttacccaaggttagggtgttgaaggaaggtagagggtggggcttcaggtctcaacggcttccctaaccacccctcttctcttggcccagcctggttccccccacttccactcccctctactctctctaggactgggctgatgaaggcactgcccaaaatttcccctacccccaactttcccctacccccaactttccccaccagctccacaaccctgtttggagctactgcaggaccagaagcacaaagtgcggtttcccaagcctttgtccatctcagcccccagagtatatctgtgcttggggaatctcacacagaaactcaggagcaccccctgcctgagctaagggaggtcttatctctcagggggggtttaagtgccgtttgcaataatgtcgtcttatttatttagcggggtgaatattttatactgtaagtgagcaatcagagtataatgtttatggtgacaaaattaaaggctttcttatatgtttaaaaaaaaaaaaaaaaaaaaaaaaaaaaaaaaaaaaaaaaaaaraaaaaaaaaaaaaaaaaaaaaaaaaaaataaaaaaaaaaaa

SEQ ID NO: 111 - DNA, 1289 bp, Homo sapien
agccaggcgtccctctgcctgcccactcagtggcaacacccgggagctgttttgtcctttgtggagcctcagcagttccctctttcagaactcactgccaagagccctgaacaggagccaccatgcagtgcttcagcttcattaagaccatgatgatcctcttcaatttgctcatctttctgtgtggtgcagccctgttggcagtgggcatctgggtgtcaatcgatggggcatcctttctgaagatcttcgggccactgtcgtccagtgccatgcagtttgtcaacgtgggctacttcctcatcgcagccggcgttgtggtctttgctcttggtttcctgggctgctatggtgctaagactgagagcaagtgtgccctcgtgacgttcttcttcatcctcctcctcatcttcattgctgaggttgcagctgctgtggtcgccttggtgtacaccacaatggctgagcacttcctgacgttgctggtagtgcctgccatcaagaaagattatggttcccaggaagacttcactcaagtgtggaacaccaccatgaaagggctcaagtgctgtggcttcaccaactatacggattttgaggactcaccctacttcaaagagaacagtgcctttcccccattctgttgcaatgacaacgtcaccaacacagccaatgaaacctgcaccaagcaaaaggctcacgaccaaaaagtagagggttgcttcaatcagcttttgtatgacatccgaactaatgcagtcaccgtgggtggtgtggcagctggaattgggggcctcgagctggctgccatgattgtgtccatgtatctgtactgcaatctacaataagtccacttctgcctctgccactactgctgccacatgggaactgtgaagaggcaccctggcaagcagcagtgattgggggaggggacaggatctaacaatgtcacttgggccagaatggacctgccctttctgctccagacttggggctagatagggaccactccttttagcgatgcctgactttccttccattggtgggtggatgggtggggggcattccagagcctctaaggtagccagttctgttgcccattcccccagtctattaaacccttgatatgccccctaggcctagtggtgatcccagtgctctactgggggatgagagaaaggcattttatagcctgggcataagtgaaatcagcagagcctctgggtggatgtgtagaaggcacttcaaaatgcataaacctgttacaatgttaaaaaaaaaaaaaaaaa

SEQ ID NO: 112 - protein, 315 aa, Homo sapien
MVFTVRLLHIFTVNKQLGPKIVIVSKMMKDVFFFLFFLGVWLVAYGVATEGLLRPRDSDFPSILRRVFYRPYLQIFGQIPQEDMDVALMEHSNCSSEPGFWAHPPGAQAGTCVSQYANWLVVLLLVIFLLVANILLVNLLIAMFSYTFGKVQGNSDLYWKAQRYRLIREFHSRPALAPPFIVISHLRLLLRQLCRRPRSPQPSSPALEHFRVYLSKEAERKLLTWESVHKENFLLARARDKRESDSERLKRTSQKVDLALKQLGHIREYEQRLKVLEREVQQCSRVLGWVAEALSRSALLPPGGPPPPDLPGSKD

SEQ ID NO: 113 - protein, 553 aa, Homo sapien
MVQRLWVSRLLRHRKAQLLLVNLLTFGLEVCLAAGITYVPPLLLEVGVEEKFMTMVLGIGPVLGLVCVPLLGSASDHWRGRYGRRRPFIWALSLGILLSLFLIPRAGWLAGLLCPDPRPLELALLILGVGLLDFCGQVCFTPLEALLSDLFRDPDHCRQAYSVYAFMISLGGCLGYLLPAIDWDTSALAPYLGTQEECLFGLLTLIFLTCVAATLLVAEEAALGPTEPAEGLSAPSLSPHCCPCRARLAFRNLGALLPRLHQLCCRMPRTLRRLFVAELCSWMALMTFTLFYTDFVGEGLYQGVPRAEPGTEARRHYDEGVRMGSLGLFLQCAISLVFSLVMDRLVQRFGTRAVYLASVAAFPVAAGATCLSHSVAVVTASAALTGFTFSALQILPYTLASLYHREKQVFLPKYRGDTGGASSEDSLMTSFLPGPKPGAPFPNGHVGAGGSGLLPPPPALCGASACDVSVRVVVGEPTEARVVPGRGICLDLAILDSAFLLSQVAPSLFMGSIVQLSQSVTAYMVSAAGLGLVAIYFATQVVFDKSDLAKYSA

SEQ ID NO: 114 - protein, 241 aa, Homo sapien
MQCFSFIKTMMILFNLLIFLCGAALLAVGIWVSIDGASFLKIFGPLSSSAMQFVNVGYFLIAAGVVVFALGFLGCYGAKTESKCALVTFFFILLLIFIAEVAAAVVALVYTTMAEHFLTLLVVPAIKKDYGSQEDFTQVWNTTMKGLKCCGFTNYTDFEDSPYFKENSAFPPFCCNDNVTNTANETCTKQKAHDQKVEGCFNQLLYDIRTNAVTVGGVAAGIGGLELAAMIVSMYLYCNLQ

SEQ ID NO: 115 - DNA, 366 bp, Homo sapien
gctctttctctcccctcctctgaatttaattctttcaacttgcaatttgcaaggattacacatttcactgtgatgtatattgtgttgcaaaaaaaaaaaagtgtctttgtttaaaattacttggtttgtgaatccatcttgctttttccccattggaactagtcattaacccatctctgaactggtagaaaaacatctgaagagctagtctatcagcatctgacaggtgaattggatggttctcagaaccatttcacccagacagcctgtttctatcctgtttaataaattagtttgggttctctacatgcataacaaaccctgctccaatctgtcacataaaagtctgtgacttgaagtttagtc

SEQ ID NO: 116 - DNA, 282 bp, Homo sapien
  misc_feature (1)...(282): n = A,T,C or G
acaaagatgaaccatttcctatattatagcaaaattaaaatctacccgtattctaatattgagaaatgagatnaaacacaatnttataaagtctacttagagaagatcaagtgacctcaaagactttactattttcatattttaagacacatgatttatcctattttagtaacctggttcatacgttaaacaaaggataatgtgaacagcagagaggatttgttggcagaaaatctatgttcaatctngaactatctanatcacagacatttctattccttt

SEQ ID NO: 117 - DNA, 305 bp, Homo sapien
  misc_feature (1)...(305): n = A,T,C or G
acacatgtcgcttcactgccttcttagatgcttctggtcaacatanaggaacagggaccatatttatcctccctcctgaaacaattgcaaaataanacaaaatatatgaaacaattgcaaaataaggcaaaatatatgaaacaacaggtctcgagatattggaaatcagtcaatgaaggatactgatccctgatcactgtcctaatgcaggatgtgggaaacagatgaggtcacctctgtgactgccccagcttactgcctgtagagagtttctangctgcagttcagacagggagaaattgggt

SEQ ID NO: 118 - DNA, 71 bp, Homo sapien
  misc_feature (1)...(71): n = A,T,C or G
accaaggtgtntgaatctctgacgtggggatctctgattcccgcacaatctgagtggaaaaantcctgggt

SEQ ID NO: 119 - DNA, 212 bp, Homo sapien
  misc_feature (1)...(212): n = A,T,C or G
actccggttggtgtcagcagcacgtggcattgaacatngcaatgtggagcccaaaccacagaaaatggggtgaaattggccaactttctatnaacttatgttggcaantttgccaccaacagtaagctggcccttctaataaaagaaaattgaaaggtttctcactaancggaattaantaatggantcaaganactcccaggcctcagcgt

SEQ ID NO: 120 - DNA, 90 bp, Homo sapien
  misc_feature (1)...(90): n = A,T,C or G
actcgttgcanatcaggggccccccagagtcaccgttgcaggagtccttctggtcttgccctccgccggcgcagaacatgctggggtggt

SEQ ID NO: 121 - DNA, 218 bp, Homo sapien
  misc_feature (1)...(218): n = A,T,C or G
tgtancgtgaanacgacaganagggttgtcaaaaatggagaanccttgaagtcattttgagaataagatttgctaaaagatttggggctaaaacatggttattgggagacatttctgaagatatncangtaaattanggaatgaattcatggttcttttgggaattcctttacgatngccagcatanacttcatgtggggatancagctacccttgta

SEQ ID NO: 122 - DNA, 171 bp, Homo sapien
taggggtgtatgcaactgtaaggacaaaaattgagactcaactggcttaaccaataaaggcatttgttagctcatggaacaggaagtcggatggtggggcatcttcagtgctgcatgagtcaccaccccggcggggtcatctgtgccacaggtccctgttgacagtgcggt

SEQ ID NO: 123 - DNA, 76 bp, Homo sapien
  misc_feature (1)...(76): n = A,T,C or G
tgtagcgtgaagacnacagaatggtgtgtgctgtgctatccaggaacacatttattatcattatcaantattgtgt

SEQ ID NO: 124 - DNA, 131 bp, Homo sapien
acctttccccaaggccaatgtcctgtgtgctaactggccggctgcaggacagctgcaattcaatgtgctgggtcatatggaggggaggagactctaaaatagccaattttattctcttggttaagatttgt

SEQ ID NO: 125 - DNA, 432 bp, Homo sapien
actttatctactggctatgaaatagatggtggaaaattgcgttaccaactataccactggcttgaaaaagaggtgatagctcttcagaggacttgtgacttttgctcagatgctgaagaactacagtctgcatttggcagaaatgaagatgaatttggattaaatgaggatgctgaagatttgcctcaccaaacaaaagtgaaacaactgagagaaaattttcaggaaaaaagacagtggctcttgaagtatcagtcacttttgagaatgtttcttagttactgcatacttcatggatcccatggtgggggtcttgcatctgtaagaatggaattgattttgcttttgcaagaatctcagcaggaaacatcagaaccactattttctagccctctgtcagagcaaacctcagtgcctctcctctttgcttgt

SEQ ID NO: 126 - DNA, 112 bp, Homo sapien
acacaacttgaatagtaaaatagaaactgagctgaaatttctaattcactttctaaccatagtaagaatgatatttccccccagggatcaccaaatatttataaaaatttgt

SEQ ID NO: 127 - DNA, 54 bp, Homo sapien
accacgaaaccacaaacaagatggaagcatcaatccacttgccaagcacagcag

SEQ ID NO: 128 - DNA, 323 bp, Homo sapien
acctcattagtaattgttttgttgtttcatttttttctaatgtctcccctctaccagctcacctgagataacagaatgaaaatggaaggacagccagatttctcctttgctctctgctcattctctctgaagtctaggttacccattttggggacccattataggcaataaacacagttcccaaagcatttggacagtttcttgttgtgttttagaatggttttcctttttcttagccttttcctgcaaaaggctcactcagtcccttgcttgctcagtggactgggctccccagggcctaggctgccttcttttccatgtcc

SEQ ID NO: 129 - DNA, 192 bp, Homo sapien
  misc_feature (1)...(192): n = A,T,C or G
acatacatgtgtgtatatttttaaatatcacttttgtatcactctgactttttagcatactgaaaacacactaacataatttntgtgaaccatgatcagatacaacccaaatcattcatctagcacattcatctgtgatanaaagataggtgagtttcatttccttcacgttggccaatggataaacaaagt

SEQ ID NO: 130 - DNA, 362 bp, Homo sapien
  misc_feature (1)...(362): n = A,T,C or G
cccttttttatggaatgagtagactgtatgtttgaanatttanccacaacctctttgacatataatgacgcaacaaaaaggtgctgtttagtcctatggttcagtttatgcccctgacaagtttccattgtgttttgccgatcttctggctaatcgtggtatcctccatgttattagtaattctgtattccattttgttaacgcctggtagatgtaacctgctangaggctaactttatacttatttaaaagctcttattttgtggtcattaaaatggcaatttatgtgcagcactttattgcagcaggaagcacgtgtgggttggttgtaaagctctttgctaatcttaaaaagtaatggg

SEQ ID NO: 131 - DNA, 332 bp, Homo sapien
  misc_feature (1)...(332): n = A,T,C or G
ctttttgaaagatcgtgtccactcctgtggacatcttgttttaatggagtttcccatgcagtangactggtatggttgcagctgtccagataaaaacatttgaagagctccaaaatgagagttctcccaggttcgccctgctgctccaagtctcagcagcagcctcttttaggaggcatcttctgaactagattaaggcagcttgtaaatctgatgtgatttggtttattatccaactaacttccatctgttatcactggagaaagcccagactccccangacnggtacggattgtgggcatanaaggattgggtgaagctggcgttgtggt

SEQ ID NO: 132 - DNA, 322 bp, Homo sapien
  misc_feature (1)...(322): n = A,T,C or G
acttttgccattttgtatatataaacaatcttgggacattctcctgaaaactaggtgtccagtggctaagagaactcgatttcaagcaattctgaaaggaaaaccagcatgacacagaatctcaaattcccaaacaggggctctgtgggaaaaatgagggaggacctttgtatctcgggttttagcaagttaaaatgaanatgacaggaaaggcttatttatcaacaaagagaagagttgggatgcttctaaaaaaaactttggtagagaaaataggaatgctnaatcctagggaagcctgtaacaatctacaattggtcca

SEQ ID NO: 133 - DNA, 278 bp, Homo sapien
  misc_feature (1)...(278): n = A,T,C or G
acaagccttcacaagtttaactaaattgggattaatctttctgtanttatctgcataattcttgtttttctttccatctggctcctgggttgacaatttgtggaaacaactctattgctactatttaaaaaaaatcacaaatctttccctttaagctatgttnaattcaaactattcctgctattcctgttttgtcaaagaaattatatttttcaaaatatgtntatttgtttgatgggtcccacgaaacactaataaaaaccacagagaccagcctg

SEQ ID NO: 134 - DNA, 121 bp, Homo sapien
  misc_feature (1)...(121): n = A,T,C or G
gtttanaaaacttgtttagctccatagaggaaagaatgttaaactttgtattttaaaacatgattctctgaggttaaacttggttttcaaatgttatttttacttgtattttgcttttggt

SEQ ID NO: 135 - DNA, 350 bp, Homo sapien
  misc_feature (1)...(350): n = A,T,C or G
acttanaaccatgcctagcacatcagaatccctcaaagaacatcagtataatcctataccatancaagtggtgactggttaagcgtgcgacaaaggtcagctggcacattacttgtgtgcaaacttgatacttttgttctaagtaggaactagtatacagtncctaggantggtactccagggtgccccccaactcctgcagccgctcctctgtgccagnccctgnaaggaactttcgctccacctcaatcaagccctgggccatgctacctgcaattggctgaacaaacgtttgctgagttcccaaggatgcaaagcctggtgctcaactcctggggcgtcaactcagt

SEQ ID NO: 136 - DNA, 399 bp, Homo sapien
  misc_feature (1)...(399): n = A,T,C or G
tgtaccgtgaagacgacagaagttgcatggcagggacagggcagggccgaggccagggttgctgtgattgtatccgaatantcctcgtgagaaaagataatgagatgacgtgagcagcctgcagacttgtgtctgccttcaanaagccagacaggaaggccctgcctgccttggctctgacctggcggccagccagccagccacaggtgggcttcttccttttgtggtgacaacnccaagaaaactgcagaggcccagggtcaggtgtnagtgggtangtgaccataaaacaccaggtgctcccaggaacccgggcaaaggccatccccacctacagccagcatgcccactggcgtgatgggtgcaganggatgaagcagccagntgttctgctgtggt

SEQ ID NO: 137 - DNA, 165 bp, Homo sapien
  misc_feature (1)...(165): n = A,T,C or G
actggtgtggtngggggtgatgctggtggtanaagttgangtgacttcangatggtgtgtggaggaagtgtgtgaacgtagggatgtagangttttggccgtgctaaatgagcttcgggattggctggtcccactggtggtcactgtcattggtggggttcctgt

SEQ ID NO: 138 - DNA, 338 bp, Homo sapien
  misc_feature (1)...(338): n = A,T,C or G
actcactggaatgccacattcacaacagaatcagaggtctgtgaaaacattaatggctccttaacttctccagtaagaatcagggacttgaaatggaaacgttaacagccacatgcccaatgctgggcagtctcccatgccttccacagtgaaagggcttgagaaaaatcacatccaatgtcatgtgtttccagccacaccaaaaggtgcttggggtggagggctgggggcatananggtcangcctcaggaagcctcaagttccattcagctttgccactgtacattccccatntttaaaaaaactgatgccttttttttttttttttgtaaaattc

SEQ ID NO: 139 - DNA, 382 bp, Homo sapien
gggaatcttggtttttggcatctggtttgcctatagccgaggccactttgacagaacaaagaaagggacttcgagtaagaaggtgatttacagccagcctagtgcccgaagtgaaggagaattcaaacagacctcgtcattcctggtgtgagcctggtcggctcaccgcctatcatctgcatttgccttactcaggtgctaccggactctggcccctgatgtctgtagtttcacaggatgccttatttgtcttctacaccccacagggccccctacttcttcggatgtgtttttaataatgtcagctatgtgccccatcctccttcatgccctccctccctttcctaccactgctgagtggcctggaacttgtttaaagtgt

SEQ ID NO: 140 - DNA, 200 bp, Homo sapien
  misc_feature (1)...(200): n = A,T,C or G
accaaancttctttctgttgtgttngattttactataggggtttngcttnttctaaanatacttttcatttaacancttttgttaagtgtcaggctgcactttgctccatanaattattgttttcacatttcaacttgtatgtgtttgtctcttanagcattggtgaaatcacatattttatattcagcataaaggagaa

SEQ ID NO: 141 - DNA, 335 bp, Homo sapien
  misc_feature (1)...(335): n = A,T,C or G
actttattttcaaaacactcatatgttgcaaaaaacacatagaaaaataaagtttggtgggggtgctgactaaacttcaagtcacagacttttatgtgacagattggagcagggtttgttatgcatgtagagaacccaaactaatttattaaacaggatagaaacaggctgtctgggtgaaatggttctgagaaccatccaattcacctgtcagatgctgatanactagctcttcagatgtttttctaccagttcagagatnggttaatgactanttccaatggggaaaaagcaagatggattcacaaaccaagtaattttaaacaaagacactt

SEQ ID NO: 142 - DNA, 459 bp, Homo sapien
  misc_feature (1)...(459): n = A,T,C or G
accaggttaatattgccacatatatcctttccaattgcgggctaaacagacgtgtatttagggttgtttaaagacaacccagcttaatatcaagagaaattgtgacctttcatggagtatctgatggagaaaacactgagttttgacaaatcttattttattcagatagcagtctgatcacacatggtccaacaacactcaaataataaatcaaatatnatcagatgttaaagattggtcttcaaacatcatagccaatgatgccccgcttgcctataatctctccgacataaaaccacatcaacacctcagtggccaccaaaccattcagcacagcttccttaactgtgagctgtttgaagctaccagtctgagcactattgactatntttttcangctctgaatagctctagggatctcagcangggtgggaggaaccagctcaaccttggcgtant

SEQ ID NO: 143 - DNA, 140 bp, Homo sapien
acatttccttccaccaagtcaggactcctggcttctgtgggagttcttatcacctgagggaaatccaaacagtctctcctagaaaggaatagtgtcaccaaccccacccatctccctgagaccatccgacttccctgtgt

SEQ ID NO: 144 - DNA, 164 bp, Homo sapien
  misc_feature (1)...(164): n = A,T,C or G
acttcagtaacaacatacaataacaacattaagtgtatattgccatctttgtcattttctatctataccactctcccttctgaaaacaanaatcactanccaatcacttatacaaatttgaggcaattaatccatatttgttttcaataaggaaaaaaagatgt

SEQ ID NO: 145 - DNA, 303 bp, Homo sapien
  misc_feature (1)...(303): n = A,T,C or G
acgtagaccatccaactttgtatttgtaatggcaaacatccagnagcaattcctaaacaaactggagggtatttatacccaattatcccattcattaacatgccctcctcctcaggctatgcaggacagctatcataagtcggcccaggcatccagatactaccatttgtataaacttcagtaggggagtccatccaagtgacaggtctaatcaaaggaggaaatggaacataagcccagtagtaaaatnttgcttagctgaaacagccacaaaagacttaccgccgtggtgattaccatcaa

SEQ ID NO: 146 - DNA, 327 bp, Homo sapien
  misc_feature (1)...(327): n = A,T,C or G
actgcagctcaattagaagtggtctctgactttcatcancttctccctgggctccatgacactggcctggagtgactcattgctctggttggttgagagagctcctttgccaacaggcctccaagtcagggctgggatttgtttcctttccacattctagcaacaatatgctggccacttcctgaacagggagggtgggaggagccagcatggaacaagctgccactttctaaagtagccagacttgcccctgggcctgtcacacctactgatgaccttctgtgcctgcaggatggaatgtaggggtgagctgtgtgactctatggt

SEQ ID NO: 147 - DNA, 173 bp, Homo sapien
  misc_feature (1)...(173): n = A,T,C or G
acattgtttttttgagataaagcattganagagctctccttaacgtgacacaatggaaggactggaacacatacccacatctttgttctgagggataattttctgataaagtcttgctgtatattcaagcacatatgttatatattattcagttccatgtttatagcctagtt

SEQ ID NO: 148 - DNA, 477 bp, Homo sapien
  misc_feature (1)...(477): n = A,T,C or G
acaaccactttatctcatcgaatttttaacccaaactcactcactgtgcctttctatcctatgggatatattatttgatgctccatttcatcacacatatatgaataatacactcatactgccctactacctgctgcaataatcacattcccttcctgtcctgaccctgaagccattggggtggtcctagtggccatcagtccangcctgcaccttgagcccttgagctccattgctcacnccancccacctcaccgaccccatcctcttacacagctacctccttgctctctaaccccatagattatntccaaattcagtcaattaagttactattaacactctacccgacatgtccagcaccactggtaagccttctccagccaacacacacacacacacacncacacacacacatatccaggcacaggctacctcatcttcacaatcacccctttaattaccatgctatggtgg

SEQ ID NO: 149 - DNA, 207 bp, Homo sapien
acagttgtattataatatcaagaaataaacttgcaatgagagcatttaagagggaagaactaacgtattttagagagccaaggaaggtttctgtggggagtgggatgtaaggtggggcctgatgataaataagagtcagccaggtaagtgggtggtgtggtatgggcacagtgaagaacatttcaggcagagggaacagcagtgaaa

SEQ ID NO: 150 - DNA, 111 bp, Homo sapien
  misc_feature (1)...(111): n = A,T,C or G
accttgatttcattgctgctctgatggaaacccaactatctaatttagctaaaacatgggcacttaaatgtggtcagtgtttggacttgttaactantggcatctttgggt

SEQ ID NO: 151 - DNA, 196 bp, Homo sapien
agcgcggcaggtcatattgaacattccagatacctatcattactcgatgctgttgataacagcaagatggctttgaactcagggtcaccaccagctattggaccttactatgaaaaccatggataccaaccggaaaacccctatcccgcacagcccactgtggtccccactgtctacgaggtgcatccggctcagt

SEQ ID NO: 152 - DNA, 132 bp, Homo sapien
acagcactttcacatgtaagaagggagaaattcctaaatgtaggagaaagataacagaaccttccccttttcatctagtggtggaaacctgatgctttatgttgacaggaatagaaccaggagggagtttgt

SEQ ID NO: 153 - DNA, 285 bp, Homo sapien
  misc_feature (1)...(285): n = A,T,C or G
acaanacccanganaggccactggccgtggtgtcatggcctccaaacatgaaagtgtcagcttctgctcttatgtcctcatctgacaactctttaccatttttatcctcgctcagcaggagcacatcaataaagtccaaagtcttggacttggccttggcttggaggaagtcatcaacaccctggctagtgagggtgcggcgccgctcctggatgacggcatctgtgaagtcgtgcaccagtctgcaggccctgtggaagcgccgtccacacggagtnaggaatt

SEQ ID NO: 154 - DNA, 333 bp, Homo sapien
accacagtcctgttgggccagggcttcatgaccctttctgtgaaaagccatattatcaccaccccaaatttttccttaaatatctttaactgaaggggtcagcctcttgactgcaaagaccctaagccggttacacagctaactcccactggccctgatttgtgaaattgctgctgcctgattggcacaggagtcgaaggtgttcagctcccctcctccgtggaacgagactctgatttgagtttcacaaattctcgggccacctcgtcattgctcctctgaaataaaatccggagaatggtcaggcctgtctcatccatatggatcttccgg

SEQ ID NO: 155 - DNA, 308 bp, Homo sapien
  misc_feature (1)...(308): n = A,T,C or G
actggaaataataaaacccacatcacagtgttgtgtcaaagatcatcagggcatggatgggaaagtgctttgggaactgtaaagtgcctaacacatgatcgatgatttttgttataatatttgaatcacggtgcatacaaactctcctgcctgctcctcctgggccccagccccagccccatcacagctcactgctctgttcatccaggcccagcatgtagtggctgattcttcttggctgcttttagcctccanaagtttctctgaagccaaccaaacctctangtgtaaggcatgctggccctggt

SEQ ID NO: 156 - DNA, 295 bp, Homo sapien
accttgctcggtgcttggaacatattaggaactcaaaatatgagatgataacagtgcctattattgattactgagagaactgttagacatttagttgaagattttctacacaggaactgagaataggagattatgtttggccctcatattctctcctatcctccttgcctcattctatgtctaatatattctcaatcaaataaggttagcataatcaggaaatcgaccaaataccaatataaaaccagatgtctatccttaagattttcaaatagaaaacaaattaacagactat

SEQ ID NO: 157 - DNA, 126 bp, Homo sapien
acaagtttaaatagtgctgtcactgtgcatgtgctgaaatgtgaaatccaccacatttctgaagagcaaaacaaattctgtcatgtaatctctatcttgggtcgtgggtatatctgtccccttagt

SEQ ID NO: 158 - DNA, 442 bp, Homo sapien
  misc_feature (1)...(442): n = A,T,C or G
acccactggtcttggaaacacccatccttaatacgatgatttttctgtcgtgtgaaaatgaanccagcaggctgcccctagtcagtccttccttccagagaaaaagagatttgagaaagtgcctgggtaattcaccattaatttcctcccccaaactctctgagtcttcccttaatatttctggtggttctgaccaaagcaggtcatggtttgttgagcatttgggatcccagtgaagtanatgtttgtagccttgcatacttagcccttcccacgcacaaacggagtggcagagtggtgccaaccctgttttcccagtccacgtagacagattcacagtgcggaattctggaagctgganacagacgggctctttgcagagccgggactctgaganggacatgagggcctctgcctctgtgttcattctctgatgtcctgt

SEQ ID NO: 159 - DNA, 498 bp, Homo sapien
  misc_feature (1)...(498): n = A,T,C or G
acttccaggtaacgttgttgtttccgttgagcctgaactgatgggtgacgttgtaggttctccaacaagaactgaggttgcagagcgggtagggaagagtgctgttccagttgcacctgggctgctgtggactgttgttgattcctcactacggcccaaggttgtggaactggcanaaaggtgtgttgttgganttgagctcgggcggctgtggtaggttgtgggctcttcaacaggggctgctgtggtgccgggangtgaangtgttgtgtcacttgagcttggccagctctggaaagtantanattcttcctgaaggccagcgcttgtggagctggcangggtcantgttgtgtgtaacgaaccagtgctgctgtgggtgggtgtanatcctccacaaagcctgaagttatggtgtcntcaggtaanaatgtggtttcagtgtccctgggcngctgtggaaggttgtanattgtcaccaagggaataagctgtggt

SEQ ID NO: 160 - DNA, 380 bp, Homo sapien
  misc_feature (1)...(380): n = A,T,C or G
acctgcatccagcttccctgccaaactcacaaggagacatcaacctctagacagggaaacagcttcaggatacttccaggagacagagccaccagcagcaaaacaaatattcccatgcctggagcatggcatagaggaagctganaaatgtggggtctgaggaagccatttgagtctggccactagacatctcatcagccacttgtgtgaagagatgccccatgaccccagatgcctctcccacccttacctccatctcacacacttgagctttccactctgtataattctaacatcctggagaaaaatggcagtttgaccgaacctgttcacaacggtagaggctgatttctaacgaaacttgtagaatgaagcctgga

SEQ ID NO: 161 - DNA, 114 bp, Homo sapien
actccacatcccctctgagcaggcggttgtcgttcaaggtgtatttggccttgcctgtcacactgtccactggccccttatccacttggtgcttaatccctcgaaagagcatgt

SEQ ID NO: 162 - DNA, 177 bp, Homo sapien
actttctgaatcgaatcaaatgatacttagtgtagttttaatatcctcatatatatcaaagttttactactctgataattttgtaaaccaggtaaccagaacatccagtcatacagcttttggtgatatataacttggcaataacccagtctggtgatacataaaactactcactgt

SEQ ID NO: 163 - DNA, 137 bp, Homo sapien
  misc_feature (1)...(137): n = A,T,C or G
catttatacagacaggcgtgaagacattcacgacaaaaacgcgaaattctatcccgtgaccanagaaggcagctacggctactcctacatcctggcgtgggtggccttcgcctgcaccttcatcagcggcatgatgt

SEQ ID NO: 164 - DNA, 469 bp, Homo sapien
  misc_feature (1)...(469): n = A,T,C or G
cttatcacaatgaatgttctcctgggcagcgttgtgatctttgccaccttcgtgactttatgcaatgcatcatgctatttcatacctaatgagggagttccaggagattcaaccaggaaatgcatggatctcaaaggaaacaaacacccaataaactcggagtggcagactgacaactgtgagacatgcacttgctacgaaacagaaatttcatgttgcacccttgtttctacacctgtgggttatgacaaagacaactgccaaagaatcttcaagaaggaggactgcaagtatatcgtggtggagaagaaggacccaaaaaagacctgttctgtcagtgaatggataatctaatgtgcttctagtaggcacagggctcccaggccaggcctcattctcctctggcctctaatagtcaatgattgtgtagccatgcctatcagtaaaaagatntttgagcaaacacttt

SEQ ID NO: 165 - DNA, 195 bp, Homo sapien
  misc_feature (1)...(195): n = A,T,C or G
acagttttttatanatatcgacattgccggcacttgtgttcagtttcataaagctggtggatccgctgtcatccactattccttggctagagtaaaaattattcttatagcccatgtccctgcaggccgcccgcccgtagttctcgttccagtcgtcttggcacacagggtgccaggacttcctctgagatgagt

SEQ ID NO: 166 - DNA, 383 bp, Homo sapien
  misc_feature (1)...(383): n = A,T,C or G
acatcttagtagtgtggcacatcagggggccatcagggtcacagtcactcatagcctcgccgaggtcggagtccacaccaccggtgtaggtgtgctcaatcttgggcttggcgcccacctttggagaagggatatgctgcacacacatgtccacaaagcctgtgaactcgccaaagaatttttgcagaccagcctgagcaaggggcggatgttcagcttcagctcctccttcgtcaggtggatgccaacctcgtctanggtccgtgggaagctggtgtccacntcacctacaacctgggcgangatcttataaagaggctccnagataaactccacgaaacttctctgggagctgctagtnggggcctttttggtgaactttc

SEQ ID NO: 167 - DNA, 247 bp, Homo sapien
  misc_feature (1)...(247): n = A,T,C or G
acagagccagaccttggccataaatgaancagagattaagactaaaccccaagtcganattggagcagaaactggagcaagaagtgggcctggggctgaagtagagaccaaggccactgctatanccatacacagagccaactctcaggccaaggcnatggttggggcaganccagagactcaatctgantccaaagtggtggctggaacactggtcatgacanaggcagtgactctgactgangtc

SEQ ID NO: 168 - DNA, 273 bp, Homo sapien
  misc_feature (1)...(273): n = A,T,C or G
acttctaagttttctagaagtggaaggattgtantcatcctgaaaatgggtttacttcaaaatccctcanccttgttcttcacnactgtctatactganagtgtcatgtttccacaaagggctgacacctgagcctgnattttcactcatccctgagaagccctttccagtagggtgggcaattcccaacttccttgccacaagcttcccaggctttctcccctggaaaactccagcttgagtcccagatacactcatgggctgccctgggca

SEQ ID NO: 169 - DNA, 431 bp, Homo sapien
  misc_feature (1)...(431): n = A,T,C or G
acagccttggcttccccaaactccacagtctcagtgcagaaagatcatcttccagcagtcagctcagaccagggtcaaaggatgtgacatcaacagtttctggtttcagaacaggttctactactgtcaaatgaccccccatacttcctcaaaggctgtggtaagttttgcacaggtgagggcagcagaaagggggtanttactgatggacaccatcttctctgtatactccacactgaccttgccatgggcaaaggcccctaccacaaaaacaataggatcactgctgggcaccagctcacgcacatcactgacaaccgggatggaaaaagaantgccaactttcatacatccaactggaaagtgatctgatactggattcttaattaccttcaaaagcttctgggggccatcagctgctcgaacactga

SEQ ID NO: 170 - DNA, 266 bp, Homo sapien
  misc_feature (1)...(266): n = A,T,C or G
acctgtgggctgggctgttatgcctgtgccggctgctgaaagggagttcagaggtggagctcaaggagctctgcaggcattttgccaancctctccanagcanagggagcaacctacactccccgctagaaagacaccagattggagtcctgggagggggagttggggtgggcatttgatgtatacttgtcacctgaatgaangagccagagaggaangagacgaanatganattggccttcaaagctaggggtctggcaggtgga

SEQ ID NO: 171 - DNA, 1248 bp, Homo sapien
  misc_feature (1)...(1248): n = A,T,C or G
ggcagccaaatcataaacggcgaggactgcagcccgcactcgcagccctggcaggcggcactggtcatggaaaacgaattgttctgctcgggcgtcctggtgcatccgcagtgggtgctgtcagccgcacactgtttccagaagtgagtgcagagctcctacaccatcgggctgggcctgcacagtcttgaggccgaccaagagccagggagccagatggtggaggccagcctctccgtacggcacccagagtacaacagacccttgctcgctaacgacctcatgctcatcaagttggacgaatccgtgtccgagtctgacaccatccggagcatcagcattgcttcgcagtgccctaccgcggggaactcttgcctcgtttctggctggggtctgctggcgaacggcagaatgcctaccgtgctgcagtgcgtgaacgtgtcggtggtgtctgaggaggtctgcagtaagctctatgacccgctgtaccaccccagcatgttctgcgccggcggagggcaagaccagaaggactcctgcaacggtgactctggggggcccctgatctgcaacgggtacttgcagggccttgtgtctttcggaaaagccccgtgtggccaagttggcgtgccaggtgtctacaccaacctctgcaaattcactgagtggatagagaaaaccgtccaggccagttaactctggggactgggaacccatgaaattgacccccaaatacatcctgcggaaggaattcaggaatatctgttcccagcccctcctccctcaggcccaggagtccaggcccccagcccctcctccctcaaaccaagggtacagatccccagcccctcctccctcagacccaggagtccagaccccccagcccctcctccctcagacccaggagtccagcccctcctccctcagacccaggagtccagaccccccagcccctcctccctcagacccaggggtccaggcccccaacccctcctccctcagactcagaggtccaagcccccaacccntcattccccagacccagaggtccaggtcccagcccctcntccctcagacccagcggtccaatgccacctagactntccctgtacacagtgcccccttgtggcacgttgacccaaccttaccagttggtttttcatttttngtccctttcccctagatccagaaataaagtttaagagaagngcaaaaaaaaaaaaaaaaaaaaaaaaaaaaaaaaaaaaa

SEQ ID NO: 172 - protein, 159 aa, Homo sapien
  VARIANT (1)...(159): Xaa = Any Amino Acid
MVEASLSVRHPEYNRPLLANDLMLIKLDESVSESDTIRSISIASQCPTAGNSCLVSGWGLLANGRMPTVLQCVNVSVVSEEVCSKLYDPLYHPSMFCAGGGQXQXDSCNGDSGGPLICNGYLQGLVSFGKAPCGQVGVPGVYTNLCKFTEWIEKTVQAS

SEQ ID NO: 173 - DNA, 1265 bp, Homo sapien
  misc_feature (1)...(1265): n = A,T,C or G
ggcagcccgcactcgcagccctggcaggcggcactggtcatggaaaacgaattgttctgctcgggcgtcctggtgcatccgcagtgggtgctgtcagccgcacactgtttccagaactcctacaccatcgggctgggcctgcacagtcttgaggccgaccaagagccagggagccagatggtggaggccagcctctccgtacggcacccagagtacaacagacccttgctcgctaacgacctcatgctcatcaagttggacgaatccgtgtccgagtctgacaccatccggagcatcagcattgcttcgcagtgccctaccgcggggaactcttgcctcgtttctggctggggtctgctggcgaacggtgagctcacgggtgtgtgtctgccctcttcaaggaggtcctctgcccagtcgcgggggctgacccagagctctgcgtcccaggcagaatgcctaccgtgctgcagtgcgtgaacgtgtcggtggtgtctgaggaggtctgcagtaagctctatgacccgctgtaccaccccagcatgttctgcgccggcggagggcaagaccagaaggactcctgcaacggtgactctggggggcccctgatctgcaacgggtacttgcagggccttgtgtctttcggaaaagccccgtgtggccaagttggcgtgccaggtgtctacaccaacctctgcaaattcactgagtggatagagaaaaccgtccaggccagttaactctggggactgggaacccatgaaattgacccccaaatacatcctgcggaaggaattcaggaatatctgttcccagcccctcctccctcaggcccaggagtccaggcccccagcccctcctccctcaaaccaagggtacagatccccagcccctcctccctcagacccaggagtccagaccccccagcccctcctccctcagacccaggagtccagcccctcctccntcagacccaggagtccagaccccccagcccctcctccctcagacccaggggttgaggcccccaacccctcctccttcagagtcagaggtccaagcccccaacccctcgttccccagacccagaggtnnaggtcccagcccctcttccntcagacccagnggtccaatgccacctagattttccctgnacacagtgcccccttgtggnangttgacccaaccttaccagttggtttttcatttttngtccctttcccctagatccagaaataaagtttaagagangngcaaaaaaaaaa

SEQ ID NO: 174 - DNA, 1459 bp, Homo sapien
  misc_feature (1)...(1459): n = A,T,C or G
ggtcagccgcacactgtttccagaagtgagtgcagagctcctacaccatcgggctgggcctgcacagtcttgaggccgaccaagagccagggagccagatggtggaggccagcctctccgtacggcacccagagtacaacagacccttgctcgctaacgacctcatgctcatcaagttggacgaatccgtgtccgagtctgacaccatccggagcatcagcattgcttcgcagtgccctaccgcggggaactcttgcctcgtttctggctggggtctgctggcgaacggtgagctcacgggtgtgtgtctgccctcttcaaggaggtcctctgcccagtcgcgggggctgacccagagctctgcgtcccaggcagaatgcctaccgtgctgcagtgcgtgaacgtgtcggtggtgtctgangaggtctgcantaagctctatgacccgctgtaccaccccancatgttctgcgccggcggagggcaagaccagaaggactcctgcaacgtgagagaggggaaaggggagggcaggcgactcagggaagggtggagaagggggagacagagacacacagggccgcatggcgagatgcagagatggagagacacacagggagacagtgacaactagagagagaaactgagagaaacagagaaataaacacaggaataaagagaagcaaaggaagagagaaacagaaacagacatggggaggcagaaacacacacacatagaaatgcagttgaccttccaacagcatggggcctgagggcggtgacctccacccaatagaaaatcctcttataacttttgactccccaaaaacctgactagaaatagcctactgttgacggggagccttaccaataacataaatagtcgatttatgcatacgttttatgcattcatgatatacctttgttggaattttttgatatttctaagctacacagttcgtctgtgaatttttttaaattgttgcaactctcctaaaatttttctgatgtgtttattgaaaaaatccaagtataagtggacttgtgcattcaaaccagggttgttcaagggtcaactgtgtacccagagggaaacagtgacacagattcatagaggtgaaacacgaagagaaacaggaaaaatcaagactctacaaagaggctgggcagggtggctcatgcctgtaatcccagcactttgggaggcgaggcaggcagatcacttgaggtaaggagttcaagaccagcctggccaaaatggtgaaatcctgtctgtactaaaaatacaaaagttagctggatatggtggcaggcgcctgtaatcccagctacttgggaggctgaggcaggagaattgcttgaatatgggaggcagaggttgaagtgagttgagatcacaccactatactccagctggggcaacagagtaagactctgtctcaaaaaaaaaaaaaaaaaa

SEQ ID NO: 175 - DNA, 1167 bp, Homo sapien
  misc_feature (1)...(1167): n = A,T,C or G
gcgcagccctggcaggcggcactggtcatggaaaacgaattgttctgctcgggcgtcctggtgcatccgcagtgggtgctgtcagccgcacactgtttccagaactcctacaccatcgggctgggcctgcacagtcttgaggccgaccaagagccagggagccagatggtggaggccagcctctccgtacggcacccagagtacaacagactcttgctcgctaacgacctcatgctcatcaagttggacgaatccgtgtccgagtctgacaccatccggagcatcagcattgcttcgcagtgccctaccgcggggaactcttgcctcgtntctggctggggtctgctggcgaacggcagaatgcctaccgtgctgcactgcgtgaacgtgtcggtggtgtctgaggangtctgcagtaagctctatgacccgctgtaccaccccagcatgttctgcgccggcggagggcaagaccagaaggactcctgcaacggtgactctggggggcccctgatctgcaacgggtacttgcagggccttgtgtctttcggaaaagccccgtgtggccaacttggcgtgccaggtgtctacaccaacctctgcaaattcactgagtggatagagaaaaccgtccagnccagttaactctggggactgggaacccatgaaattgacccccaaatacatcctgcggaangaattcaggaatatctgttcccagcccctcctccctcaggcccaggagtccaggcccccagcccctcctccctcaaaccaagggtacagatccccagcccctcctccctcagacccaggagtccagaccccccagcccctcntccntcagacccaggagtccagcccctcctccntcagacgcaggagtccagaccccccagcccntcntccgtcagacccaggggtgcaggcccccaacccctcntccntcagagtcagaggtccaagcccccaacccctcgttccccagacccagaggtncaggtcccagcccctcctccctcagacccagcggtccaatgccacctagantntccctgtacacagtgcccccttgtggcangttgacccaaccttaccagttggtttttcattttttgtccctttcccctagatccagaaataaagtntaagagaagcgcaaaaaaa

SEQ ID NO: 176 - protein, 205 aa, Homo sapien
  VARIANT (1)...(205): Xaa = Any Amino Acid
MENELFCSGVLVHPQWVLSAAHCFQNSYTIGLGLHSLEADQEPGSQMVEASLSVRHPEYNRLLLANDLMLIKLDESVSESDTIRSISIASQCPTAGNSCLVSGWGLLANGRMPTVLHCVNVSVVSEXVCSKLYDPLYHPSMFCAGGGQDQKDSCNGDSGGPLICNGYLQGLVSFGKAPCGQLGVPGVYTNLCKFTEWIEKTVQXS

SEQ ID NO: 177 - DNA, 1119 bp, Homo sapien
gcgcactcgcagccctggcaggcggcactggtcatggaaaacgaattgttctgctcgggcgtcctggtgcatccgcagtgggtgctgtcagccgcacactgtttccagaactcctacaccatcgggctgggcctgcacagtcttgaggccgaccaagagccagggagccagatggtggaggccagcctctccgtacggcacccagagtacaacagacccttgctcgctaacgacctcatgctcatcaagttggacgaatccgtgtccgagtctgacaccatccggagcatcagcattgcttcgcagtgccctaccgcggggaactcttgcctcgtttctggctggggtctgctggcgaacgatgctgtgattgccatccagtcccagactgtgggaggctgggagtgtgagaagctttcccaaccctggcagggttgtaccatttcggcaacttccagtgcaaggacgtcctgctgcatcctcactgggtgctcactactgctcactgcatcacccggaacactgtgatcaactagccagcaccatagttctccgaagtcagactatcatgattactgtgttgactgtgctgtctattgtactaaccatgccgatgtttaggtgaaattagcgtcacttggcctcaaccatcttggtatccagttatcctcactgaattgagatttcctgcttcagtgtcagccattcccacataatttctgacctacagaggtgagggatcatatagctcttcaaggatgctggtactcccctcacaaattcatttctcctgttgtagtgaaaggtgcgccctctggagcctcccagggtgggtgtgcaggtcacaatgatgaatgtatgatcgtgttcccattacccaaagcctttaaatccctcatgctcagtacaccagggcaggtctagcatttcttcatttagtgtatgctgtccattcatgcaaccacctcaggactcctggattctctgcctagttgagctcctgcatgctgcctccttggggaggtgagggagagggcccatggttcaatgggatctgtgcagttgtaacacattaggtgcttaataaacagaagctgtgatgttaaaaaaaaaaaaaaa

SEQ ID NO: 178 - protein, 164 aa, Homo sapien
  VARIANT (1)...(164): Xaa = Any Amino Acid
MENELFCSGVLVHPQWVLSAAHCFQNSYTIGLGLHSLEADQEPGSQMVEASLSVRHPEYNRPLLANDLMLIKLDESVSESDTIRSISIASQCPTAGNSCLVSGWGLLANDAVIAIQSXTVGGWECEKLSQPWQGCTISATSSARTSCCILTGCSLLLTASPGTL

SEQ ID NO: 179 - DNA, 250 bp, Homo sapien
ctggagtgccttggtgtttcaagcccctgcaggaagcagaatgcaccttctgaggcacctccagctgcccccggccgggggatgcgaggctcggagcacccttgcccggctgtgattgctgccaggcactgttcatctcagcttttctgtccctttgctcccggcaagcgcttctgctgaaagttcatatctggagcctgatgtcttaacgaataaaggtcccatgctccacccgaaaaaaaaaaaaaaa

SEQ ID NO: 180 - DNA, 202 bp, Homo sapien
actagtccagtgtggtggaattccattgtgttgggcccaacacaatggctacctttaacatcacccagaccccgcccctgcccgtgccccacgctgctgctaacgacagtatgatgcttactctgctactcggaaactatttttatgtaattaatgtatgctttcttgtttataaatgcctgatttaaaaaaaaaaaaaaaa

SEQ ID NO: 181 - DNA, 558 bp, Homo sapien
  misc_feature (1)...(558): n = A,T,C or G
tccytttgktnaggtttkkgagacamccckagacctwaanctgtgtcacagacttcynggaatgtttaggcagtgctagtaatttcytcgtaatgattctgttattactttcctnattctttattcctctttcttctgaagattaatgaagttgaaaattgaggtggataaatacaaaaaggtagtgtgatagtataagtatctaagtgcagatgaaagtgtgttatatatatccattcaaaattatgcaagttagtaattactcagggttaactaaattactttaatatgctgttgaacctactctgttccttggctagaaaaaattataaacaggactttgttagtttgggaagccaaattgataatattctatgttctaaaagttgggctatacataaattattaagaaatatggawttttattcccaggaatatggkgttcattttatgaatattacscrggatagawgtwtgagtaaaaycagttttggtwaataygtwaatatgtcmtaaataaacaakgctttgacttatttccaaaaaaaaaaaaaaaaa

SEQ ID NO: 182 - DNA, 479 bp, Homo sapien
  misc_feature (1)...(479): n = A,T,C or G
acagggwttkgrggatgctaagsccccrgarwtygtttgatccaaccctggcttwttttcagaggggaaaatggggcctagaagttacagmscatytagytggtgcgmtggcacccctggcstcacacagastcccgagtagctgggactacaggcacacagtcactgaagcaggccctgttwgcaattcacgttgccacctccaacttaaacattcttcatatgtgatgtccttagtcactaaggttaaactttcccacccagaaaaggcaacttagataaaatcttagagtactttcatactmttctaagtcctcttccagcctcactkkgagtcctmcytgggggttgataggaantntctcttggctttctcaataaartctctatycatctcatgtttaatttggtacgcataraawtgstgaraaaattaaaatgttctggttymactttaaaaaraaaaaaaaaaaaaaaaa

SEQ ID NO: 183 - DNA, 384 bp, Homo sapien
aggcgggagcagaagctaaagccaaagcccaagaagagtggcagtgccagcactggtgccagtaccagtaccaataacagtgccagtgccagtgccagcaccagtggtggcttcagtgctggtgccagcctgaccgccactctcacatttgggctcttcgctggccttggtggagctggtgccagcaccagtggcagctctggtgcctgtggtttctcctacaagtgagattttagatattgttaatcctgccagtctttctcttcaagccagggtgcatcctcagaaacctactcaacacagcactctaggcagccactatcaatcaattgaagttgacactctgcattaratctatttgccatttcaaaaaaaaaaaaaaaa

SEQ ID NO: 184 - DNA, 496 bp, Homo sapien
  misc_feature (1)...(496): n = A,T,C or G
accgaattgggaccgctggcttataagcgatcatgtyyntccrgtatkacctcaacgagcagggagatcgagtctatacgctgaagaaatttgacccgatgggacaacagacctgctcagcccatcctgctcggttctccccagatgacaaatactctsgacaccgaatcaccatcaagaaacgcttcaaggtgctcatgacccagcaaccgcgccctgtcctctgagggtcccttaaactgatgtcttttctgccacctgttacccctcggagactccgtaaccaaactcttcggactgtgagccctgatgcctttttgccagccatactctttggcatccagtctctcgtggcgattgattatgcttgtgtgaggcaatcatggtggcatcacccataaagggaacacatttgacttttttttctcatattttaaattactacmagawtattwmagawwaaatgawttgaaaaactsttaaaaaaaaaaaaaaa

SEQ ID NO: 185 - DNA, 384 bp, Homo sapien
gctggtagcctatggcgkggcccacggaggggctcctgaggccacggracagtgacttcccaagtatcytgcgcsgcgtcttctaccgtccctacctgcagatcttcgggcagattccccaggaggacatggacgtggccctcatggagcacagcaactgytcgtcggagcccggcttctgggcacaccctcctggggcccaggcgggcacctgcgtctcccagtatgccaactggctggtggtgctgctcctcgtcatcttcctgctcgtggccaacatcctgctggtcaacttgctcattgccatgttcagttacacattcggcaaagtacagggcaacagcgatctctactgggaaggcgcagcgttaccgcctcatccgg

SEQ ID NO: 186 - DNA, 577 bp, Homo sapien
  misc_feature (1)...(577): n = A,T,C or G
gagttagctcctccacaaccttgatgaggtcgtctgcagtggcctctcgcttcataccgctnccatcgtcatactgtaggtttgccaccacytcctggcatcttggggcggcntaatattccaggaaactctcaatcaagtcaccgtcgatgaaacctgtgggctggttctgtcttccgctcggtgtgaaaggatctcccagaaggagtgctcgatcttccccacacttttgatgactttattgagtcgattctgcatgtccagcaggaggttgtaccagctctctgacagtgaggtcaccagccctatcatgccgttgamcgtgccgaagarcaccgagccttgtgtgggggkkgaagtctcacccagattctgcattaccagagagccgtggcaaaagacattgacaaactcgcccaggtggaaaaagamcamctcctggargtgctngccgctcctcgtcmgttggtggcagcgctwtccttttgacacacaaacaagttaaaggcattttcagcccccagaaanttgtcatcatccaagatntcgcacagcactnatccagttgggattaaat

SEQ ID NO: 187 - DNA, 534 bp, Homo sapien
  misc_feature (1)...(534): n = A,T,C or G
aacatcttcctgtataatgctgtgtaatatcgatccgatnttgtctgstgagaatycatwactkggaaaagmaacattaaagcctggacactggtattaaaattcacaatatgcaacactttaaacagtgtgtcaatctgctcccyynactttgtcatcaccagtctgggaakaagggtatgccctattcacacctgttaaaagggcgctaagcatttttgattcaacatctttttttttgacacaagtccgaaaaaagcaaaagtaaacagttatyaatttgttagccaattcactttcttcatgggacagagccatytgatttaaaaagcaaattgcataatattgagcttygggagctgatatttgagcggaagagtagcctttctacttcaccagacacaactccctttcatattgggatgttnacnaaagtwatgtctctwacagatgggatgcttttgtggcaattctgttctgaggatctcccagtttatttaccacttgcacaagaaggcgttttcttcctcaggc

SEQ ID NO: 188 - DNA, 761 bp, Homo sapien
  misc_feature (1)...(761): n = A,T,C or G
agaaaccagtatctctnaaaacaacctctcataccttgtggacctaattttgtgtgcgtgtgtgtgtgcgcgcatattatatagacaggcacatcttttttacttttgtaaaagcttatgcctctttggtatctatatctgtgaaagttttaatgatctgccataatgtcttggggacctttgtcttctgtgtaaatggtactagagaaaacacctatnttatgagtcaatctagttngttttattcgacatgaaggaaatttccagatnacaacactnacaaactctccctkgackargggggacaaagaaaagcaaaactgamcataaraaacaatwacctggtgagaarttgcataaacagaaatwrggtagtatattgaarnacagcatcattaaarmgttwtkttwttctcccttgcaaaaaacatgtacngacttcccgttgagtaatgccaagttgttttttttatnataaaacttgcccttcattacatgtttnaaagtggtgtggtgggccaaaatattgaaatgatggaactgactgataaagctgtacaaataagcagtgtgcctaacaagcaacacagtaatgttgacatgcttaattcacaaatgctaatttcattataaatgtttgctaaaatacactttgaactatttttctgtnttcccagagctgagatnttagattttatgtagtatnaagtgaaaaantacgaaaataataacattgaagaaaaananaaaaaanaaaaaaa

SEQ ID NO: 189 - DNA, 482 bp, Homo sapien
  misc_feature (1)...(482): n = A,T,C or G
tttttttttttttgccgatnctactattttattgcaggangtgggggtgtatgcaccgcacaccggggctatnagaagcaagaaggaaggagggagggcacagccccttgctgagcaacaaagccgcctgctgccttctctgtctgtctcctggtgcaggcacatggggagaccttccccaaggcaggggccaccagtccaggggtgggaatacagggggtgggangtgtgcataagaagtgataggcacaggccacccggtacagacccctcggctcctgacaggtngatttcgaccaggtcattgtgccctgcccaggcacagcgtanatctggaaaagacagaatgctttccttttcaaatttggctngtcatngaangggcanttttccaanttnggctnggtcttggtacncttggttcggcccagctccncgtccaaaaantattcacccnnctccnaattgcttgcnggnccccc

SEQ ID NO: 190 - DNA, 471 bp, Homo sapien
  misc_feature (1)...(471): n = A,T,C or G
ttttttttttttttaaaacagtttttcacaacaaaatttattagaagaatagtggttttgaaaactctcgcatccagtgagaactaccatacaccacattacagctnggaatgtnctccaaatgtctggtcaaatgatacaatggaaccattcaatcttacacatgcacgaaagaacaagcgcttttgacatacaatgcacaaaaaaaaaaggggggggggaccacatggattaaaattttaagtactcatcacatacattaagacacagttctagtccagtcnaaaatcagaactgcnttgaaaaatttcatgtatgcaatccaaccaaagaacttnattggtgatcatgantnctctactacatcnaccttgatcattgccaggaacnaaaagttnaaancacncngtacaaaaanaatctgtaattnanttcaacctccgtacngaaaaatnttnnttatacactccc

SEQ ID NO: 191 - DNA, 402 bp, Homo sapien
  misc_feature (1)...(402): n = A,T,C or G
gagggattgaaggtctgttctastgtcggmctgttcagccaccaactctaacaagttgctgtcttccactcactgtctgtaagctttttaacccagacwgtatcttcataaatagaacaaattcttcaccagtcacatcttctaggacctttttggattcagttagtataagctcttccacttcctttgttaagacttcatctggtaaagtcttaagttttgtagaaaggaattyaattgctcgttctctaacaatgtcctctccttgaagtatttggctgaacaacccacctaaagtccctttgtgcatccattttaaatatacttaatagggcattgktncactaggttaaattctgcaagagtcatctgtctgcaaaagttgcgttagtatatctgcca

SEQ ID NO: 192 - DNA, 601 bp, Homo sapien
  misc_feature (1)...(601): n = A,T,C or G
gagctcggatccaataatctttgtctgagggcagcacacatatncagtgccatggnaactggtctaccccacatgggagcagcatgccgtagntatataaggtcattccctgagtcagacatgcytytttgaytaccgtgtgccaagtgctggtgattctyaacacacytccatcccgytcttttgtggaaaaactggcacttktctggaactagcargacatcacttacaaattcacccacgagacacttgaaaggtgtaacaaagcgaytcttgcattgctttttgtccctccggcaccagttgtcaatactaacccgctggtttgcctccatcacatttgtgatctgtagctctggatacatctcctgacagtactgaagaacttcttcttttgtttcaaaagcarctcttggtgcctgttggatcaggttcccatttcccagtcygaatgttcacatggcatatttwacttcccacaaaacattgcgatttgaggctcagcaacagcaaatcctgttccggcattggctgcaagagcctcgatgtagccggccagcgccaaggcaggcgccgtgagccccaccagcagcagaagcag

SEQ ID NO: 193 - DNA, 608 bp, Homo sapien
  misc_feature (1)...(608): n = A,T,C or G
atacagcccanatcccaccacgaagatgcgcttgttgactgagaacctgatgcggtcactggtcccgctgtagccccagcgactctccacctgctggaagcggttgatgctgcactcyttcccaacgcaggcagmagcgggsccggtcaatgaactccaytcgtggcttggggtkgacggtkaagtgcaggaagaggctgaccacctcgcggtccaccaggatgcccgactgtgcgggacctgcagcgaaactcctcgatggtcatgagcgggaagcgaatgaggcccagggccttgcccagaaccttccgcctgttctctggcgtcacctgcagctgctgccgctgacactcggcctcggaccagcggacaaacggcrttgaacagccgcacctcacggatgcccagtgtgtcgcgctccaggammgscaccagcgtgtccaggtcaatgtcggtgaagccctccgcgggtratggcgtctgcagtgtttttgtcgatgttctccaggcacaggctggccagctgcggttcatcgaagagtcgcgcctgcgtgagcagcatgaaggcgttgtcggctcgcagttcttcttcaggaactccacgcaat

SEQ ID NO: 194 - DNA, 392 bp, Homo sapien
  misc_feature (1)...(392): n = A,T,C or G
gaacggctggaccttgcctcgcattgtgcttgctggcagggaataccttggcaagcagytccagtccgagcagccccagaccgctgccgcccgaagctaagcctgcctctggccttcccctccgcctcaatgcagaaccagtagtgggagcactgtgtttagagttaagagtgaacactgtttgattttacttgggaatttcctctgttatatagcttttcccaatgctaatttccaaacaacaacaacaaaataacatgtttgcctgttaagttgtataaaagtaggtgattctgtatttaaagaaaatattactgttacatatactgcttgcaatttctgtatttattgktnctstggaaataaatatagttattaaaggttgtcantcc

SEQ ID NO: 195 - DNA, 502 bp, Homo sapien
  misc_feature (1)...(502): n = A,T,C or G
ccsttkgaggggtkaggkyccagttyccgagtggaagaaacaggccaggagaagtgcgtgccgagctgaggcagatgttcccacagtgacccccagagccstgggstatagtytctgacccctcncaaggaaagaccacsttctggggacatgggctggagggcaggacctagaggcaccaagggaaggccccattccggggstgttccccgaggaggaagggaaggggctctgtgtgccccccasgaggaagaggccctgagtcctgggatcagacaccccttcacgtgtatccccacacaaatgcaagctcaccaaggtcccctctcagtccccttccstacaccctgamcggccactgscscacacccacccagagcacgccacccgccatggggartgtgctcaaggartcgcngggcarcgtggacatctngtcccagaagggggcagaatctccaataganggactgarcmsttgctnanaaaaaaaaanaaaaaa

SEQ ID NO: 196 - DNA, 665 bp, Homo sapien
  misc_feature (1)...(665): n = A,T,C or G
ggttacttggtttcattgccaccacttagtggatgtcatttagaaccattttgtctgctccctctggaagccttgcgcagagcggactttgtaattgttggagaataactgctgaattttwagctgtttkgagttgattsgcaccactgcacccacaacttcaatatgaaaacyawttgaactwatttattatcttgtgaaaagtataacaatgaaaattttgttcatactgtattkatcaagtatgatgaaaagcaawagatatatattcttttattatgttaaattatgattgccattattaatcggcaaaatgtggagtgtatgttcttttcacagtaatatatgccttttgtaacttcacttggttattttattgtaaatgarttacaaaattcttaatttaagaraatggtatgtwatatttatttcattaatttctttcctkgtttacgtwaattttgaaaagawtgcatgatttcttgacagaaatcgatcttgatgctgtggaagtagtttgacccacatccctatgagtttttcttagaatgtataaaggttgtagcccatcnaacttcaaagaaaaaaatgaccacatactttgcaatcaggctgaaatgtggcatgctnttctaattccaactttataaactagcaaanaagtg

SEQ ID NO: 197 - DNA, 492 bp, Homo sapien
  misc_feature (1)...(492): n = A,T,C or G
ttttntttttttttttttgcaggaaggattccatttattgtggatgcattttcacaatatatgtttattggagcgatccattatcagtgaaaagtatcaagtgtttataanatttttaggaaggcagattcacagaacatgctngtcngcttgcagttttacctcgtanagatnacagagaattatagtcnaaccagtaaacnaggaatttacttttcaaaagattaaatccaaactgaacaaaattctaccctgaaacttactccatccaaatattggaataanagtcagcagtgatacattctcttctgaactttagattttctagaaaaatatgtaatagtgatcaggaagagctcttgttcaaaagtacaacnaagcaatgttcccttaccataggccttaattcaaactttgatccatttcactcccatcacgggagtcaatgctacctgggacacttgtattttgttcatnctgancntggcttaa

SEQ ID NO: 198 - DNA, 478 bp, Homo sapien
  misc_feature (1)...(478): n = A,T,C or G
tttnttttgnatttcantctgtannaantattttcattatgtttattanaaaaatatnaatgtntccacnacaaatcatnttacntnagtaagaggccanctacattgtacaacatacactgagtatattttgaaaaggacaagtttaaagtanacncatattgccgancatancacatttatacatggcttgattgatatttagcacagcanaaactgagtgagttaccagaaanaaatnatatatgtcaatcngatttaagatacaaaacagatcctatggtacatancatcntgtaggagttgtggctttatgtttactgaaagtcaatgcagttcctgtacaaagagatggccgtaagcattctagtacctctactccatggttaagaatcgtacacttatgtttacatatgtncagggtaagaattgtgttaagtnaanttatggagaggtccangagaaaaatttgatncaa

SEQ ID NO: 199 - DNA, 482 bp, Homo sapien
  misc_feature (1)...(482): n = A,T,C or G
agtgacttgtcctccaacaaaaccccttgatcaagtttgtggcactgacaatcagacctatgctagttcctgtcatctattcgctactaaatgcagactggaggggaccaaaaaggggcatcaactccagctggattattttggagcctgcaaatctattcctacttgtacggactttgaagtgattcagtttcctctacggatgagagactggctcaagaatatcctcatgcagctttatgaagccnactctgaacacgctggttatctnagatgagaancagagaaataaagtcnagaaaatttacctggangaaaagaggctttnggctggggaccatcccattgaaccttctcttaanggactttaagaanaaactaccacatgtntgtngtatcctggtgccnggccgtttantgaacntngacnncacccttntggaatanantcttgacngcntcctgaacttgctcctctgcga

SEQ ID NO: 200 - DNA, 270 bp, Homo sapien
  misc_feature (1)...(270): n = A,T,C or G
cggccgcaagtgcaactccagctggggccgtgcggacgaagattctgccagcagttggtccgactgcgacgacggcggcggcgacagtcgcaggtgcagcgcgggcgcctggggtcttgcaaggctgagctgacgccgcagaggtcgtgtcacgtcccacgaccttgacgccgtcggggacagccggaacagagcccggtgaangcgggaggcctcggggagcccctcgggaagggcggcccgagagatacgcaggtgcaggtggccgcc

SEQ ID NO: 201 - DNA, 419 bp, Homo sapien
  misc_feature (1)...(419): n = A,T,C or G
ttttttttttttttggaatctactgcgagcacagcaggtcagcaacaagtttattttgcagctagcaaggtaacagggtagggcatggttacatgttcaggtcaacttcctttgtcgtggttgattggtttgtctttatgggggcggggtggggtaggggaaancgaagcanaantaacatggagtgggtgcaccctccctgtagaacctggttacnaaagcttggggcagttcacctggtctgtgaccgtcattttcttgacatcaatgttattagaagtcaggatatcttttagagagtccactgtntctggagggagattagggtttcttgccaanatccaancaaaatccacntgaaaaagttggatgatncangtacngaataccganggcatanttctcatantcggtggcca

SEQ ID NO: 202 - DNA, 509 bp, Homo sapien
  misc_feature (1)...(509): n = A,T,C or G
tttntttttttttttttttttttttttttttttttttttttttttttttttttttttttttggcacttaatccatttttatttcaaaatgtctacaaantttnaatncnccattatacnggtnattttncaaaatctaaannttattcaaatntnagccaaantccttacncaaatnnaatacncncaaaaatcaaaaatatacntntctttcagcaaacttngttacataaattaaaaaaatatatacggctggtgttttcaaagtacaattatcttaacactgcaaacatntttnnaaggaactaaaataaaaaaaaacactnccgcaaaggttaaagggaacaacaaattcnttttacaacancnncnattataaaaatcatatctcaaatcttaggggaatatatacttcacacngggatcttaacttttactncactttgtttatttttttanaaccattgtnttgggcccaacacaatggnaatnccnccncnctggactagt

SEQ ID NO: 203 - DNA, 583 bp, Homo sapien
  misc_feature (1)...(583): n = A,T,C or G
ttttttttttttttttttgacccccctcttataaaaaacaagttaccattttattttacttacacatatttattttataattggtattagatattcaaaaggcagcttttaaaatcaaactaaatggaaactgccttagatacataattcttaggaattagcttaaaatctgcctaaagtgaaaatcttctctagctcttttgactgtaaatttttgactcttgtaaaacatccaaattcatttttcttgtctttaaaattatctaatctttccattttttccctattccaagtcaatttgcttctctagcctcatttcctagctcttatctactattagtaagtggcttttttcctaaaagggaaaacaggaagaganaatggcacacaaaacaaacattttatattcatatttctacctacgttaataaaatagcattttgtgaagccagctcaaaagaaggcttagatccttttatgtccattttagtcactaaacgatatcnaaagtgccagaatgcaaaaggtttgtgaacatttattcaaaagctaatataagatatttcacatactcatctttctg

SEQ ID NO: 204 - DNA, 589 bp, Homo sapien
  misc_feature (1)...(589): n = A,T,C or G
ttttttttntttttttttttttttttnctcttctttttttttganaatgaggatcgagtttttcactctctagatagggcatgaagaaaactcatctttccagctttaaaataacaatcaaatctcttatgctatatcatattttaagttaaactaatgagtcactggcttatcttctcctgaaggaaatctgttcattcttctcattcatatagttatatcaagtactaccttgcatattgagaggtttttcttctctatttacacatatatttccatgtgaatttgtatcaaacctttattttcatgcaaactagaaaataatgtnttcttttgcataagagaagagaacaatatnagcattacaaaactgctcaaattgtttgttaagnttatccattataattagttnggcaggagctaatacaaatcacatttacngacnagcaataataaaactgaagtaccagttaaatatccaaaataattaaaggaacatttttagcctgggtataattagctaattcactttacaagcatttattnagaatgaattcacatgttattattccntagcccaacacaatgg

SEQ ID NO: 205 - DNA, 545 bp, Homo sapien
  misc_feature (1)...(545): n = A,T,C or G
tttttnttttttttttcagtaataatcagaacaatatttatttttatatttaaaattcatagaaaagtgccttacatttaataaaagtttgtttctcaaagtgatcagaggaattagatatngtcttgaacaccaatattaatttgaggaaaatacaccaaaatacattaagtaaattatttaagatcatagagcttgtaagtgaaaagataaaatttgacctcagaaactctgagcattaaaaatccactattagcaaataaattactatggacttcttgctttaattttgtgatgaatatggggtgtcactggtaaaccaacacattctgaaggatacattacttagtgatagattcttatgtactttgctanatnacgtggatatgagttgacaagtttctctttcttcaatcttttaaggggcngangaaatgaggaagaaaagaaaaggattacgcatactgttctttctatnggaaggattagatatgtttcctttgccaatattaaaaaaataataatgtttactactagtgaaaccc

SEQ ID NO: 206 - DNA, 487 bp, Homo sapien
  misc_feature (1)...(487): n = A,T,C or G
ttttttttttttttttagtcaagtttctnatttttattataattaaagtcttggtcatttcatttattagctctgcaacttacatatttaaattaaagaaacgttnttagacaactgtnacaatttataaatgtaaggtgccattattgagtanatatattcctccaagagtggatgtgtcccttctcccaccaactaatgaancagcaacattagtttaattttattagtagatnatacactgctgcaaacgctaattctcttctccatccccatgtngatattgtgtatatgtgtgagttggtnagaatgcatcancaatctnacaatcaacagcaagatgaagctaggcntgggctttcggtgaaaatagactgtgtctgtctgaatcaaatgatctgacctatcctcggtggcaagaactcttcgaaccgcttcctcaaaggcngctgccacatttgtggcntctnttgcacttgtttcaaaa

SEQ ID NO: 207 - DNA, 332 bp, Homo sapien
  misc_feature (1)...(332): n = A,T,C or G
tgaattggctaaaagactgcatttttanaactagcaactcttatttctttcctttaaaaatacatagcattaaatcccaaatcctatttaaagacctgacagcttgagaaggtcactactgcatttataggaccttctggtggttctgctgttacntttgaantctgacaatccttganaatctttgcatgcagaggaggtaaaaggtattggattttcacagaggaanaacacagcgcagaaatgaaggggccaggcttactgagcttgtccactggagggctcatgggtgggacatggaaaagaaggcagcctaggccctggggagccca

SEQ ID NO: 208 - DNA, 524 bp, Homo sapien
  misc_feature (1)...(524): n = A,T,C or G
agggcgtggtgcggagggcgttactgttttgtctcagtaacaataaatacaaaaagactggttgtgttccggccccatccaaccacgaagttgatttctcttgtgtgcagagtgactgattttaaaggacatggagcttgtcacaatgtcacaatgtcacagtgtgaagggcacactcactcccgcgtgattcacatttagcaaccaacaatagctcatgagtccatacttgtaaatacttttggcagaatacttnttgaaacttgcagatgataactaagatccaagatatttcccaaagtaaatagaagtgggtcataatattaattacctgttcacatcagcttccatttacaagtcatgagcccagacactgacatcaaactaagcccacttagactcctcaccaccagtctgtcctgtcatcagacaggaggctgtcaccttgaccaaattctcaccagtcaatcatctatccaaaaaccattacctgatccacttccggtaatgcaccaccttggtga

SEQ ID NO: 209 - DNA, 159 bp, Homo sapien
gggtgaggaaatccagagttgccatggagaaaattccagtgtcagcattcttgctccttgtggccctctcctacactctggccagagataccacagtcaaacctggagccaaaaaggacacaaaggactctcgacccaaactgccccagaccctctcca

SEQ ID NO: 210 - DNA, 256 bp, Homo sapien
  misc_feature (1)...(256): n = A,T,C or G
actccctggcagacaaaggcagaggagagagctctgttagttctgtgttgttgaactgccactgaatttctttccacttggactattacatgccanttgagggactaatggaaaaacgtatggggagattttanccaatttangtntgtaaatggggagactggggcaggcgggagagatttgcagggtgnaaatggganggctggtttgttanatgaacagggacataggaggtaggcaccaggatgctaaatca

SEQ ID NO: 211 - DNA, 264 bp, Homo sapien
  misc_feature (1)...(264): n = A,T,C or G
acattgtttttttgagataaagcattgagagagctctccttaacgtgacacaatggaaggactggaacacatacccacatctttgttctgagggataattttctgataaagtcttgctgtatattcaagcacatatgttatatattattcagttccatgtttatagcctagttaaggagaggggagatacattcngaaagaggactgaaagaaatactcaagtnggaaaacagaaaaagaaaaaaaggagcaaatgagaagcct

SEQ ID NO: 212 - DNA, 328 bp, Homo sapien
  misc_feature (1)...(328): n = A,T,C or G
acccaaaaatccaatgctgaatatttggcttcattattcccanattctttgattgtcaaaggatttaatgttgtctcagcttgggcacttcagttaggacctaaggatgccagccggcaggtttatatatgcagcaacaatattcaagcgcgacaacaggttattgaacttgcccgccagttnaatttcattcccattgacttgggatccttatcatcagccagagagattgaaaatttacccctacnactctttactctctgganagggccagtggtggtagctataagcttggccacatttttttttcctttattcctttgtcaga

SEQ ID NO: 213 - DNA, 250 bp, Homo sapien
  misc_feature (1)...(250): n = A,T,C or G
acttatgagcagagcgacatatccnagtgtagactgaataaaactgaattctctccagtttaaagcattgctcactgaagggatagaagtgactgccaggagggaaagtaagccaaggctcattatgccaaagganatatacatttcaattctccaaacttcttcctcattccaagagttttcaatatttgcatgaacctgctgataanccatgttaanaaacaaatatctctctnaccttctcatcggt

SEQ ID NO: 214 - DNA, 444 bp, Homo sapien
  misc_feature (1)...(444): n = A,T,C or G
acccagaatccaatgctgaatatttggcttcattattcccagattctttgattgtcaaaggatttaatgttgtctcagcttgggcacttcagttaggacctaaggatgccagccggcaggtttatatatgcagcaacaatattcaagcgcgacaacaggttattgaacttgcccgccagttgaatttcattcccattgacttgggatccttatcatcagccanagagattgaaaatttacccctacgactctttactctctggagagggccagtggtggtagctataagcttggccacatttttttttcctttattcctttgtcagagatgcgattcatccatatgctanaaaccaacagagtgacttttacaaaattcctataganattgtgaataaaaccttacctatagttgccattactttgctctccctaatatacctc

SEQ ID NO: 215 - DNA, 366 bp, Homo sapien
  misc_feature (1)...(366): n = A,T,C or G
acttatgagcagagcgacatatccaagtgtanactgaataaaactgaattctctccagtttaaagcattgctcactgaagggatagaagtgactgccaggagggaaagtaagccaaggctcattatgccaaagganatatacatttcaattctccaaacttcttcctcattccaagagttttcaatatttgcatgaacctgctgataagccatgttgagaaacaaatatctctctgaccttctcatcggtaagcagaggctgtaggcaacatggaccatagcgaanaaaaaacttagtaatccaagctgttttctacactgtaaccaggtttccaaccaaggtggaaatctcctatacttggtgcc

SEQ ID NO: 216 - DNA, 260 bp, Homo sapien
  misc_feature (1)...(260): n = A,T,C or G
ctgtataaacagaactccactgcangagggagggccgggccaggagaatctccgcttgtccaagacaggggcctaaggagggtctccacactgctnntaagggctnttncatttttttattaataaaaagtnnaaaaggcctcttctcaacttttttcccttnggctggaaaatttaaaaatcaaaaatttcctnaagttntcaagctatcatatatactntatcctgaaaaagcaacataattcttccttccctccttt

SEQ ID NO: 217 - DNA, 262 bp, Homo sapien
  misc_feature (1)...(262): n = A,T,C or G
acctacgtgggtaagtttanaaatgttataatttcaggaanaggaacgcatataattgtatcttgcctataattttctattttaataaggaaatagcaaattggggtggggggaatgtagggcattctacagtttgagcaaaatgcaattaaatgtggaaggacagcactgaaaaattttatgaataatctgtatgattatatgtctctagagtagatttataattagccacttaccctaatatccttcatgcttgtaaagt

SEQ ID NO: 218 - DNA, 205 bp, Homo sapien
  misc_feature (1)...(205): n = A,T,C or G
accaaggtggtgcattaccggaantggatcaangacaccatcgtggccaacccctgagcacccctatcaactcccttttgtagtaaacttggaaccttggaaatgaccaggccaagactcaggcctccccagttctactgacctttgtccttangtntnangtccagggttgctaggaaaanaaatcagcagacacaggtgtaaa

SEQ ID NO: 219 - DNA, 114 bp, Homo sapien
tactgttttgtctcagtaacaataaatacaaaaagactggttgtgttccggccccatccaaccacgaagttgatttctcttgtgtgcagagtgactgattttaaaggacatgga

SEQ ID NO: 220 - DNA, 93 bp, Homo sapien
actagccagcacaaaaggcagggtagcctgaattgctttctgctctttacatttcttttaaaataagcatttagtgctcagtccctactgagt

SEQ ID NO: 221 - DNA, 167 bp, Homo sapien
  misc_feature (1)...(167): n = A,T,C or G
actangtgcaggtgcgcacaaatatttgtcgatattcccttcatcttggattccatgaggtcttttgcccagcctgtggctctactgtagtaagtttctgctgatgaggagccagnatgccccccactaccttccctgacgctccccanaaatcacccaacctctgt

SEQ ID NO: 222 - DNA, 351 bp, Homo sapien
agggcgtggtgcggagggcggtactgacctcattagtaggaggatgcattctggcaccccgttcttcacctgtcccccaatccttaaaaggccatactgcataaagtcaacaacagataaatgtttgctgaattaaaggatggatgaaaaaaattaataatgaatttttgcataatccaattttctcttttatatttctagaagaagtttctttgagcctattagatcccgggaatcttttaggtgagcatgattagagagcttgtaggttgcttttacatatatctggcatatttgagtctcgtatcaaaacaatagattggtaaaggtggtattattgtattgataagt

SEQ ID NO: 223 - DNA, 383 bp, Homo sapien
  misc_feature (1)...(383): n = A,T,C or G
aaaacaaacaaacaaaaaaaacaattcttcattcagaaaaattatcttagggactgatattggtaattatggtcaatttaatwrtrttktggggcatttccttacattgtcttgacaagattaaaatgtctgtgccaaaattttgtattttatttggagacttcttatcaaaagtaatgctgccaaaggaagtctaaggaattagtagtgttcccmtcacttgtttggagtgtgctattctaaaagattttgatttcctggaatgacaattatattttaactttggtgggggaaanagttataggaccacagtcttcacttctgatacttgtaaattaatcttttattgcacttgttttgaccattaagctatatgtttaaaa

SEQ ID NO: 224 - DNA, 320 bp, Homo sapien
cccctgaaggcttcttgttagaaaatagtacagttacaaccaataggaacaacaaaaagaaaaagtttgtgacattgtagtagggagtgtgtaccccttactccccatcaaaaaaaaaatggatacatggttaaaggataraagggcaatattttatcatatgttctaaaagagaaggaagagaaaatactactttctcraaatggaagcccttaaaggtgctttgatactgaaggacacaaatgtggccgtccatcctcctttaragttgcatgacttggacacggtaactgttgcagttttaractcmgcattgtgac

SEQ ID NO: 225 - DNA, 1214 bp, Homo sapien
gaggactgcagcccgcactcgcagccctggcaggcggcactggtcatggaaaacgaattgttctgctcgggcgtcctggtgcatccgcagtgggtgctgtcagccgcacactgtttccagaactcctacaccatcgggctgggcctgcacagtcttgaggccgaccaagagccagggagccagatggtggaggccagcctctccgtacggcacccagagtacaacagacccttgctcgctaacgacctcatgctcatcaagttggacgaatccgtgtccgagtctgacaccatccggagcatcagcattgcttcgcagtgccctaccgcggggaactcttgcctcgtttctggctggggtctgctggcgaacggcagaatgcctaccgtgctgcagtgcgtgaacgtgtcggtggtgtctgaggaggtctgcagtaagctctatgacccgctgtaccaccccagcatgttctgcgccggcggagggcaagaccagaaggactcctgcaacggtgactctggggggcccctgatctgcaacgggtacttgcagggccttgtgtctttcggaaaagccccgtgtggccaagttggcgtgccaggtgtctacaccaacctctgcaaattcactgagtggatagagaaaaccgtccaggccagttaactctggggactgggaacccatgaaattgacccccaaatacatcctgcggaaggaattcaggaatatctgttcccagcccctcctccctcaggcccaggagtccaggcccccagcccctcctccctcaaaccaagggtacagatccccagcccctcctccctcagacccaggagtccagaccccccagcccctcctccctcagacccaggagtccagcccctcctccctcagacccaggagtccagaccccccagcccctcctccctcagacccaggggtccaggcccccaacccctcctccctcagactcagaggtccaagcccccaacccctccttccccagacccagaggtccaggtcccagcccctcctccctcagacccagcggtccaatgccacctagactctccctgtacacagtgcccccttgtggcacgttgacccaaccttaccagttggtttttcattttttgtccctttcccctagatccagaaataaagtctaagagaagcgcaaaaaaaaaaaaaaaaaaaaaaaaaaaaaaaaaaaa

SEQ ID NO: 226 - DNA, 119 bp, Homo sapien
acccagtatgtgcagggagacggaaccccatgtgacagcccactccaccagggttcccaaagaacctggcccagtcataatcattcatcctgacagtggcaataatcacgataaccagt

SEQ ID NO: 227 - DNA, 818 bp, Homo sapien
acaattcatagggacgaccaatgaggacagggaatgaacccggctctcccccagccctgatttttgctacatatggggtcccttttcattctttgcaaaaacactgggttttctgagaacacggacggttcttagcacaatttgtgaaatctgtgtaraaccgggctttgcaggggagataattttcctcctctggaggaaaggtggtgattgacaggcagggagacagtgacaaggctagagaaagccacgctcggccttctctgaaccaggatggaacggcagacccctgaaaacgaagcttgtccccttccaatcagccacttctgagaacccccatctaacttcctactggaaaagagggcctcctcaggagcagtccaagagttttcaaagataacgtgacaactaccatctagaggaaagggtgcaccctcagcagagaagccgagagcttaactctggtcgtttccagagacaacctgctggctgtcttgggatgcgcccagcctttgagaggccactaccccatgaacttctgccatccactggacatgaagctgaggacactgggcttcaacactgagttgtcatgagagggacaggctctgccctcaagccggctgagggcagcaaccactctcctcccctttctcacgcaaagccattcccacaaatccagaccataccatgaagcaacgagacccaaacagtttggctcaagaggatatgaggactgtctcagcctggctttgggctgacaccatgcacacacacaaggtccacttctaggttttcagcctagatgggagtcgtgt

SEQ ID NO: 228 - DNA, 744 bp, Homo sapien
actggagacactgttgaacttgatcaagacccagaccaccccaggtctccttcgtgggatgtcatgacgtttgacatacctttggaacgagcctcctccttggaagatggaagaccgtgttcgtggccgacctggcctctcctggcctgtttcttaagatgcggagtcacatttcaatggtaggaaaagtggcttcgtaaaatagaagagcagtcactgtggaactaccaaatggcgagatgctcggtgcacattggggtgctttgggataaaagatttatgagccaactattctctggcaccagattctaggccagtttgttccactgaagcttttcccacagcagtccacctctgcaggctggcagctgaatggcttgccggtggctctgtggcaagatcacactgagatcgatgggtgagaaggctaggatgcttgtctagtgttcttagctgtcacgttggctccttccaggttggccagacggtgttggccactcccttctaaaacacaggcgccctcctggtgacagtgacccgccgtggtatgccttggcccattccagcagtcccagttatgcatttcaagtttggggtttgttcttttcgttaatgttcctctgtgttgtcagctgtcttcatttcctgggctaagcagcattgggagatgtggaccagagatccactccttaagaaccagtggcgaaagacactttctttcttcactctgaagtagctggtggt

SEQ ID NO: 229 - DNA, 300 bp, Homo sapien
cgagtctgggttttgtctataaagtttgatccctccttttctcatccaaatcatgtgaaccattacacatcgaaataaaagaaaggtggcagacttgcccaacgccaggctgacatgtgctgcagggttgttgttttttaattattattgttagaaacgtcacccacagtccctgttaatttgtatgtgacagccaactctgagaaggtcctatttttccacctgcagaggatccagtctcactaggctcctccttgccctcacactggagtctccgccagtgtgggtgcccactgacat

SEQ ID NO: 230 - DNA, 301 bp, Homo sapien
cagcagaacaaatacaaatatgaagagtgcaaagatctcataaaatctatgctgaggaatgagcgacagttcaaggaggagaagcttgcagagcagctcaagcaagctgaggagctcaggcaatataaagtcctggttcacactcaggaacgagagctgacccagttaagggagaagttgcgggaagggagagatgcctccctctcattgaatgagcatctccaggccctcctcactccggatgaaccggacaagtcccaggggcaggacctccaagaaacagacctcggccgcgaccacg

SEQ ID NO: 231 - DNA, 301 bp, Homo sapien
gcaagcacgctggcaaatctctgtcaggtcagctccagagaagccattagtcattttagccaggaactccaagtccacatccttggcaactggggacttgcgcaggttagccttgaggatggcaacacgggacttctcatcaggaagtgggatgtagatgagctgatcaagacggccaggtctgaggatggcaggatcaatgatgtcaggccggttggtaccgccaatgatgaacacatttttttttgtggacatgccatccatttctgtcaggatctggttgatgactcggtcagcagcc

SEQ ID NO: 232 - DNA, 301 bp, Homo sapien
agtaggtatttcgtgagaagttcaacaccaaaactggaacatagttctccttcaagtgttggcgacagcggggcttcctgattctggaatataactttgtgtaaattaacagccacctatagaagagtccatctgctgtgaaggagagacagagaactctgggttccgtcgtcctgtccacgtgctgtaccaagtgctggtgccagcctgttacctgttctcactgaaaatctggctaatgctcttgtgtatcacttctgattctgacaatcaatcaatcaatggcctagagcactgactg

SEQ ID NO: 233 - DNA, 301 bp, Homo sapien
atgactgacttcccagtaaggctctctaaggggtaagtaggaggatccacaggatttgagatgctaaggccccagagatcgtttgatccaaccctcttattttcagaggggaaaatggggcctagaagttacagagcatctagctggtgcgctggcacccctggcctcacacagactcccgagtagctgggactacaggcacacagtcactgaagcaggccctgttagcaattctatgcgtacaaattaacatgagatgagtagagactttattgagaaagcaagagaaaatcctatcaac

SEQ ID NO: 234 - DNA, 301 bp, Homo sapien
aggtcctacacatcgagactcatccatgattgatatgaatttaaaaattacaagcaaagacattttattcatcatgatgctttcttttgtttcttcttttcgttttcttctttttctttttcaatttcagcaacatacttctcaatttcttcaggatttaaaatcttgagggattgatctcgcctcatgacagcaagttcaatgtttttgccacctgactgaaccacttccaggagtgccttgatcaccagcttaatggtcagatcatctgcttcaatggcttcgtcagtatagttcttct

SEQ ID NO: 235 - DNA, 283 bp, Homo sapien
tggggctgtgcatcaggcgggtttgagaaatattcaattctcagcagaagccagaatttgaattccctcatcttttagggaatcatttaccaggtttggagaggattcagacagctcaggtgctttcactaatgtctctgaacttctgtccctctttgttcatggatagtccaataaataatgttatctttgaactgatgctcataggagagaatataagaactctgagtgatatcaacattagggattcaaagaaatattagatttaagctcacactggtca

SEQ ID NO: 236 - DNA, 301 bp, Homo sapien
aggtcctccaccaactgcctgaagcacggttaaaattgggaagaagtatagtgcagcataaatacttttaaatcgatcagatttccctaacccacatgcaatcttcttcaccagaagaggtcggagcagcatcattaataccaagcagaatgcgtaatagataaatacaatggtatatagtgggtagacggcttcatgagtacagtgtactgtggtatcgtaatctggacttgggttgtaaagcatcgtgtaccagtcagaaagcatcaatactcgacatgaacgaatataaagaacacca

SEQ ID NO: 237 - DNA, 301 bp, Homo sapien
cagtggtagtggtggtggacgtggcgttggtcgtggtgccttttttggtgcccgtcacaaactcaatttttgttcgctcctttttggccttttccaatttgtccatctcaattttctgggccttggctaatgcctcatagtaggagtcctcagaccagccatggggatcaaacatatcctttgggtagttggtgccaagctcgtcaatggcacagaatggatcagcttctcgtaaatctagggttccgaaattctttcttcctttggataatgtagttcatatccattccctcctttatct

SEQ ID NO: 238 - DNA, 301 bp, Homo sapien
gggcaggtttttttttttttttttttgatggtgcagacccttgctttatttgtctgacttgttcacagttcagccccctgctcagaaaaccaacgggccagctaaggagaggaggaggcaccttgagacttccggagtcgaggctctccagggttccccagcccatcaatcattttctgcaccccctgcctgggaagcagctccctggggggtgggaatgggtgactagaagggatttcagtgtgggacccagggtctgttcttcacagtaggaggtggaagggatgactaatttctttat

SEQ ID NO: 239 - DNA, 239 bp, Homo sapien
ataagcagctagggaattctttatttagtaatgtcctaacataaaagttcacataactgcttctgtcaaaccatgatactgagctttgtgacaacccagaaataactaagagaaggcaaacataataccttagagatcaagaaacatttacacagttcaactgtttaaaaatagctcaacattcagccagtgagtagagtgtgaatgccagcatacacagtatacaggtccttcaggga

SEQ ID NO: 240 - DNA, 300 bp, Homo sapien
ggtcctaatgaagcagcagcttccacattttaacgcaggtttacggtgatactgtcctttgggatctgccctccagtggaaccttttaaggaagaagtgggcccaagctaagttccacatgctgggtgagccagatgacttctgttccctggtcactttcttcaatggggcgaatgggggctgccaggtttttaaaatcatgcttcatcttgaagcacacggtcacttcaccctcctcacgctgtgggtgtactttgatgaaaatacccactttgttggcctttctgaagctataatgtc

SEQ ID NO: 241 - DNA, 301 bp, Homo sapien
gaggtctggtgctgaggtctctgggctaggaagaggagttctgtggagctggaagccagacctctttggaggaaactccagcagctatgttggtgtctctgagggaatgcaacaaggctgctcctccatgtattggaaaactgcaaactggactcaactggaaggaagtgctgctgccagtgtgaagaaccagcctgaggtgacagaaacggaagcaaacaggaacagccagtcttttcttcctcctcctgtcatacggtctctctcaagcatcctttgttgtcaggggcctaaaagggag

SEQ ID NO: 242 - DNA, 301 bp, Homo sapien
ccgaggtcctgggatgcaaccaatcactctgtttcacgtgacttttatcaccatacaatttgtggcatttcctcattttctacattgtagaatcaagagtgtaaataaatgtatatcgatgtcttcaagaatatatcattcctttttcactagaacccattcaaaatataagtcaagaatcttaatatcaacaaatatatcaagcaaactggaaggcagaataactaccataatttagtataagtacccaaagttttataaatcaaaagccctaatgataaccatttttagaattcaatca

SEQ ID NO: 243 - DNA, 301 bp, Homo sapien
aggtaagtcccagtttgaagctcaaaagatctggtatgagcataggctcatcgacgacatggtggcccaagctatgaaatcagagggaggcttcatctgggcctgtaaaaactatgatggtgacgtgcagtcggactctgtggcccaagggtatggctctctcggcatgatgaccagcgtgctggtttgtccagatggcaagacagtagaagcagaggctgcccacgggactgtaacccgtcactaccgcatgttccagaaaggacaggagacgtccaccaatcccattgcttccattttt

SEQ ID NO: 244 - DNA, 300 bp, Homo sapien
gctggtttgcaagaatgaaatgaatgattctacagctaggacttaaccttgaaatggaaagtcatgcaatcccatttgcaggatctgtctgtgcacatgcctctgtagagagcagcattcccagggaccttggaaacagttgacactgtaaggtgcttgctccccaagacacatcctaaaaggtgttgtaatggtgaaaacgtcttccttctttattgccccttcttatttatgtgaacaactgtttgtcttttgtgtatcttttttaaactgtaaagttcaattgtgaaaatgaatatc

SEQ ID NO: 245 - DNA, 301 bp, Homo sapien
gtctgagtatttaaaatgttattgaaattatccccaaccaatgttagaaaagaaagaggttatatacttagataaaaaatgaggtgaattactatccattgaaatcatgctcttagaattaaggccaggagatattgtcattaatgtaracttcaggacactagagtatagcagccctatgttttcaaagagcagagatgcaattaaatattgtttagcatcaaaaaggccactcaatacagctaataaaatgaaagacctaatttctaaagcaattctttataatttacaaagttttaag

SEQ ID NO: 246 - DNA, 301 bp, Homo sapien
ggtctgtcctacaatgcctgcttcttgaaagaagtcggcactttctagaatagctaaataacctgggcttattttaaagaactatttgtagctcagattggttttcctatggctaaaataagtgcttcttgtgaaaattaaataaaacagttaattcaaagccttgatatatgttaccactaacaatcatactaaatatattttgaagtacaaagtttgacatgctctaaagtgacaacccaaatgtgtcttacaaaacacgttcctaacaaggtatgctttacactaccaatgcagaaac

SEQ ID NO: 247 - DNA, 301 bp, Homo sapien
aggtcctttggcagggctcatggatcagagctcaaactggagggaaaggcatttcgggtagcctaagagggcgactggcggcagcacaaccaaggaaggcaaggttgtttcccccacgctgtgtcctgtgttcaggtgcgacacacaatcctcatgggaacaggatcacccatgcgctgcccttgatgatcaaggttggggcttaagtggattaagggaggcaagttctgggttccttgccttttcaaaccatgaagtcaggctctgtatccctccttttcctaactgatattctaactaa

SEQ ID NO: 248 - DNA, 301 bp, Homo sapien
aggtccttggagatgccatttcagccgaaggactcttctwttcggaagtacaccctcactattaggaagattcttaggggtaatttttctgaggaaggagaactagccaacttaagaattacaggaagaaagtggtttggaagacagccaaagaaataaaagcagattaaattgtatcaggtacattccagcctgttggcaactccataaaaacatttcagattttaatcccgaatttagctaatgagactggatttttgttttttatgttgtgtgtcgcagagctaaaaactcagttccc

SEQ ID NO: 249 - DNA, 301 bp, Homo sapien
gtccagaggaagcacctggtgctgaactaggcttgccctgctgtgaacttgcacttggagccctgacgctgctgttctccccgaaaaacccgaccgacctccgcgatctccgtcccgcccccagggagacacagcagtgactcagagctggtcgcacactgtgcctccctcctcaccgcccatcgtaatgaattattttgaaaattaattccaccatcctttcagattctggatggaaagactgaatctttgactcagaattgtttgctgaaaagaatgatgtgactttcttagtcattta

SEQ ID NO: 250 - DNA, 301 bp, Homo sapien
ggtctgtgacaaggacttgcaggctgtgggaggcaagtgacccttaacactacacttctccttatctttattggcttgataaacataattatttctaacactagcttatttccagttgcccataagcacatcagtacttttctctggctggaatagtaaactaaagtatggtacatctacctaaaagactactatgtggaataatacatactaatgaagtattacatgatttaaagactacaataaaaccaaacatgcttataacattaagaaaaacaataaagatacatgattgaaacca

SEQ ID NO: 251 - DNA, 301 bp, Homo sapien
gccgaggtcctacatttggcccagtttccccctgcatcctctccagggcccctgcctcatagacaacctcatagagcataggagaactggttgccctgggggcagggggactgtctggatggcaggggtcctcaaaaatgccactgtcactgccaggaaatgcttctgagcagtacacctcattgggatcaatgaaaagcttcaagaaatcttcaggctcactctcttgaaggcccggaacctctggaggggggcagtggaatcccagctccaggacggatcctgtcgaaaagatatcctc

SEQ ID NO: 252 - DNA, 301 bp, Homo sapien
gcaaccaatcactctgtttcacgtgacttttatcaccatacaatttgtggcatttcctcattttctacattgtagaatcaagagtgtaaataaatgtatatcgatgtcttcaagaatatatcattcctttttcactaggaacccattcaaaatataagtcaagaatcttaatatcaacaaatatatcaagcaaactggaaggcagaataactaccataatttagtataagtacccaaagttttataaatcaaaagccctaatgataaccatttttagaattcaatcatcactgtagaatca

SEQ ID NO: 253 - DNA, 301 bp, Homo sapien
ttccctaagaagatgttattttgttgggttttgttccccctccatctcgattctcgtacccaactaaaaaaaaaaaataaagaaaaaatgtgctgcgttctgaaaaataactccttagcttggtctgattgttttcagaccttaaaatataaacttgtttcacaagctttaatccatgtggattttttttcttagagaaccacaaaacataaaaggagcaagtcggactgaatacctgtttccatagtgcccacagggtattcctcacattttctccataggaaaatgctttttcccaagg

SEQ ID NO: 254 - DNA, 301 bp, Homo sapien
cgctgcgcctttcccttgggggaggggcaaggccagagggggtccaagtgcagcacgaggaacttgaccaattcccttgaagcgggtgggttaaaccctgtaaatgggaacaaaatccccccaaatctcttcatcttaccctggtggactcctgactgtagaattttttggttgaaacaagaaaaaaataaagctttggacttttcaaggttgcttaacaggtactgaaagactggcctcacttaaactgagccaggaaaagctgcagatttattaatgggtgtgttagtgtgcagtgcct

SEQ ID NO: 255 - DNA, 302 bp, Homo sapien
agctttttttttttttttttttttttttttttcattaaaaaatagtgctctttattataaattactgaaatgtttcttttctgaatataaatataaatatgtgcaaagtttgacttggattgggattttgttgagttcttcaagcatctcctaataccctcaagggcctgagtaggggggaggaaaaaggactggaggtggaatctttataaaaaacaagagtgattgaggcagattgtaaacattattaaaaaacaagaaacaaacaaaaaaatagagaaaaaaaccaccccaacacacaa

SEQ ID NO: 256 - DNA, 301 bp, Homo sapien
  misc_feature (1)...(301): n = A,T,C or G
gttccagaaaacattgaaggtggcttcccaaagtctaactagggataccccctctagcctaggaccctcctccccacacctcaatccaccaaaccatccataatgcacccagataggcccacccccaaaagcctggacaccttgagcacacagttatgaccaggacagactcatctctataggcaaatagctgctggcaaactggcattacctggtttgtggggatgggggggcaagtgtgtggcctctcggcctggttagcaagaacattcagggtaggcctaagttantcgtgttagtt

SEQ ID NO: 257 - DNA, 301 bp, Homo sapien
gttgtggaggaactctggcttgctcattaagtcctactgattttcactatcccctgaatttccccacttatttttgtctttcactatcgcaggccttagaagaggtctacctgcctccagtcttacctagtccagtctaccccctggagttagaatggccatcctgaagtgaaaagtaatgtcacattactcccttcagtgatttcttgtagaagtgccaatccctgaatgccaccaagatcttaatcttcacatctttaatcttatctctttgactcctctttacaccggagaaggctcc

SEQ ID NO: 258 - DNA, 301 bp, Homo sapien
  misc_feature (1)...(301): n = A,T,C or G
cagcagtagtagatgccgtatgccagcacgcccagcactcccaggatcagcaccagcaccaggggcccagccaccaggcgcagaagcaagataaacagtaggctcaagaccagagccacccccagggcaacaagaatccaataccaggactgggcaaaatcttcaaagatcttaacactgatgtctcgggcattgaggctgtcaataanacgctgatcccctgctgtatggtggtgtcattggtgatccctgggagcgccggtggagtaacgttggtccatggaaagcagcgcccacaact

SEQ ID NO: 259 - DNA, 301 bp, Homo sapien
  misc_feature (1)...(301): n = A,T,C or G
tcatatatgcaaacaaatgcagactangcctcaggcagagactaaaggacatctcttggggtgtcctgaagtgatttggacccctgagggcagacacctaagtaggaatcccagtgggaagcaaagccataaggaagcccaggattccttgtgatcaggaagtgggccaggaaggtctgttccagctcacatctcatctgcatgcagcacggaccggatgcgcccactgggtcttggcttccctcccatcttctcaagcagtgtccttgttgagccatttgcatccttggctccaggtggc

SEQ ID NO: 260 - DNA, 301 bp, Homo sapien
ttttttttctccctaaggaaaaagaaggaacaagtctcataaaaccaaataagcaatggtaaggtgtcttaacttgaaaaagattaggagtcactggtttacaagttataattgaatgaaagaactgtaacagccacagttggccatttcatgccaatggcagcaaacaacaggattaactagggcaaaataaataagtgtgtggaagccctgataagtgcttaataaacagactgattcactgagacatcagtacctgcccgggcggccgctcgagccgaattctgcagatatccatcac

SEQ ID NO: 261 - DNA, 301 bp, Homo sapien
aaatattcgagcaaatcctgtaactaatgtgtctccataaaaggctttgaactcagtgaatctgcttccatccacgattctagcaatgacctctcggacatcaaagctcctcttaaggttagcaccaactattccatacaattcatcagcaggaaataaaggctcttcagaaggttcaatggtgacatccaatttcttctgataatttagattcctcacaaccttcctagttaagtgaagggcatgatgatcatccaaagcccagtggtcacttactccagactttctgcaatgaagatca

SEQ ID NO: 262 - DNA, 301 bp, Homo sapien
gaggagagcctgttacagcatttgtaagcacagaatactccaggagtatttgtaattgtctgtgagcttcttgccgcaagtctctcagaaatttaaaaagatgcaaatccctgagtcacccctagacttcctaaaccagatcctctggggctggaacctggcactctgcatttgtaatgagggctttctggtgcacacctaattttgtgcatctttgccctaaatcctggattagtgccccatcattacccccacattataatgggatagattcagagcagatactctccagcaaagaatc

SEQ ID NO: 263 - DNA, 301 bp, Homo sapien
  misc_feature (1)...(301): n = A,T,C or G
tttagcttgtggtaaatgactcacaaaactgattttaaaatcaagttaatgtgaattttgaaaattactacttaatcctaattcacaataacaatggcattaaggtttgacttgagttggttcttagtattatttatggtaaataggctcttaccacttgcaaataactggccacatcattaatgactgacttcccagtaaggctctctaaggggtaagtangaggatccacaggatttgagatgctaaggccccagagatcgtttgatccaaccctcttattttcagaggggaaaatggg

SEQ ID NO: 264 - DNA, 301 bp, Homo sapien
aaagacgttaaaccactctactaccacttgtggaactctcaaagggtaaatgacaaasccaatgaatgactctaaaaacaatatttacatttaatggtttgtagacaataaaaaaacaaggtggatagatctagaattgtaacattttaagaaaaccatascatttgacagatgagaaagctcaattatagatgcaaagttataactaaactactatagtagtaaagaaatacatttcacacccttcatataaattcactatcttggcttgaggcactccataaaatgtatcacgtgcata

SEQ ID NO: 265 - DNA, 301 bp, Homo sapien
tgcccaagttatgtgtaagtgtatccgcacccagaggtaaaactacactgtcatctttgtcttcttgtgacgcagtatttcttctctggggagaagccgggaagtcttctcctggctctacatattcttggaagtctctaatcaacttttgttccatttgtttcatttcttcaggagggattttcagtttgtcaacatgttctctaacaacacttgcccatttctgtaaagaatccaaagcagtccaaggctttgacatgtcaacaaccagcataactagagtatccttcagagatacggc

SEQ ID NO: 266 - DNA, 301 bp, Homo sapien
taccgtctgcccttcctcccatccaggccatctgcgaatctacatgggtcctcctattcgacaccagatcactctttcctctacccacaggcttgctatgagcaagagacacaacctcctctcttctgtgttccagcttcttttcctgttcttcccaccccttaagttctattcctggggatagagacaccaatacccataacctctctcctaagcctccttataacccagggtgcacagcacagactcctgacaactggtaaggccaatgaactgggagctcacagctggctgtgcctga

SEQ ID NO: 267 - DNA, 301 bp, Homo sapien
aaagagcacaggccagctcagcctgccctggccatctagactcagcctggctccatgggggttctcagtgctgagtccatccaggaaaagctcacctagaccttctgaggctgaatcttcatcctcacaggcagcttctgagagcctgatattcctagccttgatggtctggagtaaagcctcattctgattcctctccttcttttctttcaagttggctttcctcacatccctctgttcaattcgcttcagcttgtctgctttagccctcatttccagaagcttcttctctttggcatct

SEQ ID NO: 268 - DNA, 301 bp, Homo sapien
aatgtctcactcaactacttcccagcctaccgtggcctaattctgggagttttcttcttagatcttgggagagctggttcttctaaggagaaggaggaaggacagatgtaactttggatctcgaagaggaagtctaatggaagtaattagtcaacggtccttgtttagactcttggaatatgctgggtggctcagtgagcccttttggagaaagcaagtattattcttaaggagtaaccacttcccattgttctactttctaccatcatcaattgtatattatgtattctttggagaacta

SEQ ID NO: 269 - DNA, 301 bp, Homo sapien
taacaatatacactagctatctttttaactgtccatcattagcaccaatgaagattcaataaaattacctttattcacacatctcaaaacaattctgcaaattcttagtgaagtttaactatagtcacagaccttaaatattcacattgttttctatgtctactgaaaataagttcactacttttctggatattctttacaaaatcttattaaaattcctggtattatcacccccaattatacagtagcacaaccaccttatgtagtttttacatgatagctctgtagaagtttcacatct

SEQ ID NO: 270 - DNA, 301 bp, Homo sapien
cattgaagagcttttgcgaaacatcagaacacaagtgcttataaaattaattaagccttacacaagaatacatattccttttatttctaaggagttaaacatagatgtagctgatgtggagagcttgctggtgcagtgcatattggataacactattcatggccgaattgatcaagtcaaccaactccttgaactggatcatcagaagaagggtggtgcacgatatactgcactagataatggaccaaccaactaaattctctcaccaggctgtatcagtaaactggcttaacagaaaaca

SEQ ID NO: 271 - DNA, 301 bp, Homo sapien
  misc_feature (1)...(301): n = A,T,C or G
aaaaggttctcataagattaacaatttaaataaatatttgatagaacattctttctcatttttatagctcatctttagggttgatattcagttcatgcttcccttgctgttcttgatccagaattgcaatcacttcatcagcctgtattcgctccaattctctataaagtgggtccaaggtgaaccacagagccacagcacacctctttcccttggtgactgccttcaccccatganggttctctcctccagatganaactgatcatgcgcccacattttgggttttatagaagcagtcac

SEQ ID NO: 272 - DNA, 301 bp, Homo sapien
taaattgctaagccacagataacaccaatcaaatggaacaaatcactgtcttcaaatgtcttatcagaaaaccaaatgagcctggaatcttcataatacctaaacatgccgtatttaggatccaataattccctcatgatgagcaagaaaaattctttgcgcacccctcctgcatccacagcatcttctccaacaaatataaccttgagtggcttcttgtaatctatgttctttgttttcctaaggacttccattgcatctcctacaatattttctctacgcaccactagaattaagcagg

SEQ ID NO: 273 - DNA, 301 bp, Homo sapien
  misc_feature (1)...(301): n = A,T,C or G
acatgtgtgtatgtgtatctttgggaaaanaanaagacatcttgtttaytatttttttggagagangctgggacatggataatcacwtaatttgctaytatyactttaatctgactygaagaaccgtctaaaaataaaatttaccatgtcdtatattccttatagtatgcttatttcaccttytttctgtccagagagagtatcagtgacananatttmagggtgaamacatgmattggtgggacttntytttacngagmaccctgcccgsgcgccctcgmakcnganttccgcsananct

SEQ ID NO: 274 - DNA, 301 bp, Homo sapien
  misc_feature (1)...(301): n = A,T,C or G
cttatatactctttctcagaggcaaaagaggagatgggtaatgtagacaattctttgaggaacagtaaatgattattagagagaangaatggaccaaggagacagaaattaacttgtaaatgattctctttggaatctgaatgagatcaagaggccagctttagcttgtggaaaagtccatctaggtatggttgcattctcgtcttcttttctgcagtagataatgaggtaaccgaaggcaattgtgcttcttttgataagaagctttcttggtcatatcaggaaattccaganaaagtcc

SEQ ID NO: 275 - DNA, 301 bp, Homo sapien
  misc_feature (1)...(301): n = A,T,C or G
tcggtgtcagcagcacgtggcattgaacattgcaatgtggagcccaaaccacagaaaatggggtgaaattggccaactttctattaacttatgttggcaattttgccaccaacagtaagctggcccttctaataaaagaaaattgaaaggtttctcactaaacggaattaagtagtggagtcaagagactcccaggcctcagcgtacctgcccgggcggccgctcgaagccgaattctgcagatatccatcacactggcggncgctcgancatgcatctagaaggnccaattcgccctata

SEQ ID NO: 276 - DNA, 301 bp, Homo sapien
tgtacacatactcaataaataaatgactgcattgtggtattattactatactgattatatttatcatgtgacttctaattagaaaatgtatccaaaagcaaaacagcagatatacaaaattaaagagacagaagatagacattaacagataaggcaacttatacattgagaatccaaatccaatacatttaaacatttgggaaatgagggggacaaatggaagccagatcaaatttgtgtaaaactattcagtatgtttcccttgcttcatgtctgagaaggctctccttcaatggggatg

SEQ ID NO: 277 - DNA, 301 bp, Homo sapien
  misc_feature (1)...(301): n = A,T,C or G
tttgttgatgtcagtattttattacttgcgttatgagtgctcacctgggaaattctaaagatacagaggacttggaggaagcagagcaactgaatttaatttaaaagaaggaaaacattggaatcatggcactcctgatactttcccaaatcaacactctcaatgccccaccctcgtcctcaccatagtggggagactaaagtggccacggatttgccttangtgtgcagtgcgttctgagttcnctgtcgattacatctgaccagtctcctttttccgaagtccntccgttcaatcttgc

SEQ ID NO: 278 - DNA, 301 bp, Homo sapien
  misc_feature (1)...(301): n = A,T,C or G
taccactacactccagcctgggcaacagagcaagacctgtctcaaagcataaaatggaataacatatcaaatgaaacagggaaaatgaagctgacaatttatggaagccagggcttgtcacagtctctactgttattatgcattacctgggaatttatataagcccttaataataatgccaatgaacatctcatgtgtgctcacaatgttctggcactattataagtgcttcacaggttttatgtgttcttcgtaactttatggantaggtactcggccgcgaacacgctaagccgaattc

SEQ ID NO: 279 - DNA, 301 bp, Homo sapien
  misc_feature (1)...(301): n = A,T,C or G
aaagcaggaatgacaaagcttgcttttctggtatgttctaggtgtattgtgacttttactgttatattaattgccaatataagtaaatatagattatatatgtatagtgtttcacaaagcttagacctttaccttccagccaccccacagtgcttgatatttcagagtcagtcattggttatacatgtgtagttccaaagcacataagctagaanaanaaatatttctagggagcactaccatctgttttcacatgaaatgccacacacatagaactccaacatcaatttcattgcacaga

SEQ ID NO: 280 - DNA, 301 bp, Homo sapien
ggtactggagttttcctcccctgtgaaaacgtaactactgttgggagtgaattgaggatgtagaaaggtggtggaaccaaattgtggtcaatggaaataggagaatatggttctcactcttgagaaaaaaacctaagattagcccaggtagttgcctgtaacttcagtttttctgcctgggtttgatatagtttagggttggggttagattaagatctaaattacatcaggacaaagagacagactattaactccacagttaattaaggaggtatgttccatgtttatttgttaaagcagt

SEQ ID NO: 281 - DNA, 301 bp, Homo sapien
aggtacaagaaggggaatgggaaagagctgctgctgtggcattgttcaacttggatattcgccgagcaatccaaatcctgaatgaaggggcatcttctgaaaaaggagatctgaatctcaatgtggtagcaatggctttatcgggttatacggatgagaagaactccctttggagagaaatgtgtagcacactgcgattacagctaaataacccgtatttgtgtgtcatgtttgcatttctgacaagtgaaacaggatcttacgatggagttttgtatgaaaacaaagttgcagtacctcg

SEQ ID NO: 282 - DNA, 301 bp, Homo sapien
caggtactacagaattaaaatactgacaagcaagtagtttcttggcgtgcacgaattgcatccagaacccaaaaattaagaaattcaaaaagacattttgtgggcacctgctagcacagaagcgcagaagcaaagcccaggcagaaccatgctaaccttacagctcagcctgcacagaagcgcagaagcaaagcccaggcagaaccatgctaaccttacagctcagcctgcacagaagcgcagaagcaaagcccaggcagaacatgctaaccttacagctcagcctgcacagaagcacaga

SEQ ID NO: 283 - DNA, 301 bp, Homo sapien
atctgtatacggcagacaaactttataragtgtagagaggtgagcgaaaggatgcaaaagcactttgagggctttataataatatgctgcttgaaaaaaaaaatgtgtagttgatactcagtgcatctccagacatagtaaggggttgctctgaccaatcaggtgatcattttttctatcacttcccaggttttatgcaaaaattttgttaaattctataatggtgatatgcatcttttaggaaacatatacatttttaaaaatctattttatgtaagaactgacagacgaatttgctttg

SEQ ID NO: 284 - DNA, 301 bp, Homo sapien
caggtacaaaacgctattaagtggcttagaatttgaacatttgtggtctttatttactttgcttcgtgtgtgggcaaagcaacatcttccctaaatatatattaccaagaaaagcaagaagcagattaggtttttgacaaaacaaacaggccaaaagggggctgacctggagcagagcatggtgagaggcaaggcatgagagggcaagtttgttgtggacagatctgtgcctactttattactggagtaaaagaaaacaaagttcattgatgtcgaaggatatatacagtgttagaaatta

SEQ ID NO: 285 - DNA, 301 bp, Homo sapien
  misc_feature (1)...(301): n = A,T,C or G
acatcaccatgatcggatcccccacccattatacgttgtatgtttacataaatactcttcaatgatcattagtgttttaaaaaaaatactgaaaactccttctgcatcccaatctctaaccaggaaagcaaatgctatttacagacctgcaagccctccctcaaacnaaactatttctggattaaatatgtctgacttcttttgaggtcacacgactaggcaaatgctatttacgatctgcaaaagctgtttgaagagtcaaagcccccatgtgaacacgatttctggaccctgtaacagt

SEQ ID NO: 286 - DNA, 301 bp, Homo sapien
taccactgcattccagcctgggtgacagagtgagactccgtctccaaaaaaaactttgcttgtatattatttttgccttacagtggatcattctagtaggaaaggacagtaagattttttatcaaaatgtgtcatgccagtaagagatgttatattcttttctcatttcttccccacccaaaaataagctaccatatagcttataagtctcaaatttttgccttttactaaaatgtgattgtttctgttcattgtgtatgcttcatcacctatattaggcaaattccattttttcccttgt

SEQ ID NO: 287 - DNA, 301 bp, Homo sapien
tacagatctgggaactaaatattaaaaatgagtgtggctggatatatggagaatgttgggcccagaaggaacgtagagatcagatattacaacagctttgttttgagggttagaaatatgaaatgatttggttatgaacgcacagtttaggcagcagggccagaatcctgaccctctgccccgtggttatctcctccccagcttggctgcctcatgttatcacagtattccattttgtttgttgcatgtcttgtgaagccatcaagattttctcgtctgttttcctctcattggtaatgct

SEQ ID NO: 288 - DNA, 301 bp, Homo sapien
gtacacctaactgcaaggacagctgaggaatgtaatgggcagccgcttttaaagaagtagagtcaataggaagacaaattccagttccagctcagtctgggtatctgcaaagctgcaaaagatctttaaagacaatttcaagagaatatttccttaaagttggcaatttggagatcatacaaaagcatctgcttttgtgatttaatttagctcatctggccactggaagaatccaaacagtctgccttaattttggatgaatgcatgatggaaattcaataatttagaaagttaaaaaaaa

SEQ ID NO: 289 - DNA, 301 bp, Homo sapien
  misc_feature (1)...(301): n = A,T,C or G
ggtacactgtttccatgttatgtttctacacattgctacctcagtgctcctggaaacttagcttttgatgtctccaagtagtccaccttcatttaactctttgaaactgtatcatctttgccaagtaagagtggtggcctatttcagctgctttgacaaaatgactggctcctgacttaacgttctataaatgaatgtgctgaagcaaagtgcccatggtggcggcgaanaagagaaagatgtgttttgttttggactctctgtggtcccttccaatgctgtgggtttccaaccagnggaa

SEQ ID NO: 290 - DNA, 301 bp, Homo sapien
  misc_feature (1)...(301): n = A,T,C or G
acactgagctcttcttgataaatatacagaatgcttggcatatacaagattctatactactgactgatctgttcatttctctcacagctcttacccccaaaagcttttccaccctaagtgttctgacctccttttctaatcacagtagggatagaggcaganccacctacaatgaacatggagttctatcaagaggcagaaacagcacagaatcccagttttaccattcgctagcagtgctgccttgaacaaaaacatttctccatgtctcattttcttcatgcctcaagtaacagtgaga

SEQ ID NO: 291 - DNA, 301 bp, Homo sapien
caggtaccaatttcttctatcctagaaacatttcattttatgttgttgaaacataacaactatatcagctagattttttttctatgctttacctgctatggaaaatttgacacattctgctttactcttttgtttataggtgaatcacaaaatgtatttttatgtattctgtagttcaatagccatggctgtttacttcatttaatttatttagcataaagacattatgaaaaggcctaaacatgagcttcacttccccactaactaattagcatctgttatttcttaaccgtaatgccta

SEQ ID NO: 292 - DNA, 301 bp, Homo sapien
  misc_feature (1)...(301): n = A,T,C or G
accttttagtagtaatgtctaataataaataagaaatcaattttataaggtccatatagctgtattaaataatttttaagtttaaaagataaaataccatcattttaaatgttggtattcaaaaccaaagnatataaccgaaaggaaaaacagatgagacataaaatgatttgcnagatgggaaatatagtasttyatgaatgttnattaaattccagttataatagtggctacacactctcactacacacacagaccccacagtcctatatgccacaaacacatttccataacttgaaaa

SEQ ID NO: 293 - DNA, 301 bp, Homo sapien
ggtaccaagtgctggtgccagcctgttacctgttctcactgaaaagtctggctaatgctcttgtgtagtcacttctgattctgacaatcaatcaatcaatggcctagagcactgactgttaacacaaacgtcactagcaaagtagcaacagctttaagtctaaatacaaagctgttctgtgtgagaattttttaaaaggctacttgtataataacccttgtcatttttaatgtacctcggccgcgaccacgctaagccgaattctgcagatatccatcacactggcggccgctcgagcatg

SEQ ID NO: 294 - DNA, 301 bp, Homo sapien
  misc_feature (1)...(301): n = A,T,C or G
tgacccataacaatatacactagctatctttttaactgtccatcattagcaccaatgaagattcaataaaattacctttattcacacatctcaaaacaattctgcaaattcttagtgaagtttaactatagtcacagancttaaatattcacattgttttctatgtctactgaaaataagttcactacttttctgggatattctttacaaaatcttattaaaattcctggtattatcacccccaattatacagtagcacaaccaccttatgtagtttttacatgatagctctgtagaggtt

SEQ ID NO: 295 - DNA, 305 bp, Homo sapien
gtactctttctctcccctcctctgaatttaattctttcaacttgcaatttgcaaggattacacatttcactgtgatgtatattgtgttgcaaaaaaaaaagtgtctttgtttaaaattacttggtttgtgaatccatcttgctttttccccattggaactagtcattaacccatctctgaactggtagaaaaacrtctgaagagctagtctatcagcatctgacaggtgaattggatggttctcagaaccatttcacccagacagcctgtttctatcctgtttaataaattagtttgggttctct

SEQ ID NO: 296 - DNA, 301 bp, Homo sapien
aggtactatgggaagctgctaaaataatatttgatagtaaaagtatgtaatgtgctatctcacctagtagtaaactaaaaataaactgaaactttatggaatctgaagttattttccttgattaaatagaattaataaaccaatatgaggaaacatgaaaccatgcaatctactatcaactttgaaaaagtgattgaacgaaccacttagctttcagatgatgaacactgataagtcatttgtcattactataaattttaaaatctgttaataagatggcctatagggaggaaaaaggggc

SEQ ID NO: 297 - DNA, 300 bp, Homo sapien
  misc_feature (1)...(300): n = A,T,C or G
actgagttttaactggacgccaagcaggcaaggctggaaggttttgctctctttgtgctaaaggttttgaaaaccttgaaggagaatcattttgacaagaagtacttaagagtctagagaacaaagangtgaaccagctgaaagctctcgggggaancttacatgtgttgttaggcctgttccatcattgggagtgcactggccatccctcaaaatttgtctgggctggcctgagtggtcaccgcacctcggccgcgaccacgctaagccgaattctgcagatatccatcacactggcgg

SEQ ID NO: 298 - DNA, 301 bp, Homo sapien
  misc_feature (1)...(301): n = A,T,C or G
tatggggtttgtcacccaaaagctgatgctgagaaaggcctccctggggcccctcccgcgggcatctgagagacctggtgttccagtgtttctggaaatgggtcccagtgccgccggctgtgaagctctcagatcaatcacgggaagggcctggcggtggtggccacctggaaccaccctgtcctgtctgtttacatttcactaycaggttttctctgggcattacnatttgttcccctacaacagtgacctgtgcattctgctgtggcctgctgtgtctgcaggtggctctcagcgaggt

SEQ ID NO: 299 - DNA, 301 bp, Homo sapien
gttttgagacggagtttcactcttgttgcccagactggactgcaatggcagggtctctgctcactgcaccctctgcctcccaggttcgagcaattctcctgcctcagcctcccaggtagctgggattgcaggctcacgccaccatacccagctaatttttttgtatttttagtagagacggagtttcgccatgttggccagctggtctcaaactcctgacctcaagcgacctgcctgcctcggcctcccaaagtgctggaattataggcatgagtcaacacgcccagcctaaagatatttt

SEQ ID NO: 300 - DNA, 301 bp, Homo sapien
attcagttttatttgctgccccagtatctgtaaccaggagtgccacaaaatcttgccagatatgtcccacacccactgggaaaggctcccacctggctacttcctctatcagctgggtcagctgcattccacaaggttctcagcctaatgagtttcactacctgccagtctcaaaacttagtaaagcaagaccatgacattcccccacggaaatcagagtttgccccaccgtcttgttactataaagcctgcctctaacagtccttgcttcttcacaccaatcccgagcgcatcccccatg

SEQ ID NO: 301 - DNA, 301 bp, Homo sapien
ttaaatttttgagaggataaaaaggacaaataatctagaaatgtgtcttcttcagtctgcagaggaccccaggtctccaagcaaccacatggtcaagggcatgaataattaaaagttggtgggaactcacaaagaccctcagagctgagacacccacaacagtgggagctcacaaagaccctcagagctgagacacccacaacagtgggagctcacaaagaccctcagagctgagacacccacaacagcacctcgttcagctgccacatgtgtgaataaggatgcaatgtccagaagtgtt

SEQ ID NO: 302 - DNA, 301 bp, Homo sapien
aggtacacatttagcttgtggtaaatgactcacaaaactgattttaaaatcaagttaatgtgaattttgaaaattactacttaatcctaattcacaataacaatggcattaaggtttgacttgagttggttcttagtattatttatggtaaataggctcttaccacttgcaaataactggccacatcattaatgactgacttcccagtaaggctctctaaggggtaagtaggaggatccacaggatttgagatgctaaggccccagagatcgtttgatccaaccctcttattttcagaggg

SEQ ID NO: 303 - DNA, 301 bp, Homo sapien
aggtaccaactgtggaaataggtagaggatcattttttctttccatatcaactaagttgtatattgttttttgacagtttaacacatcttcttctgtcagagattctttcacaatagcactggctaatggaactaccgcttgcatgttaaaaatggtggtttgtgaaatgatcataggccagtaacgggtatgtttttctaactgatcttttgctcgttccaaagggacctcaagacttccatcgattttatatctggggtctagaaaaggagttaatctgttttccctcataaattcacc

SEQ ID NO: 304 - DNA, 301 bp, Homo sapien
acatggatgttattttgcagactgtcaacctgaatttgtatttgcttgacattgcctaattattagtttcagtttcagcttacccactttttgtctgcaacatgcaraasagacagtgccctttttagtgtatcatatcaggaatcatctcacattggtttgtgccattactggtgcagtgactttcagccacttgggtaaggtggagttggccatatgtctccactgcaaaattactgattttccttttgtaattaataagtgtgtgtgtgaagattctttgagatgaggtatatatctc

SEQ ID NO: 305 - DNA, 301 bp, Homo sapien
  misc_feature (1)...(301): n = A,T,C or G
gangtacagcgtggtcaaggtaacaagaagaaaaaaatgtgagtggcatcctgggatgagcagggggacagacctggacagacacgttgtcatttgctgctgtgggtaggaaaatgggcgtaaaggaggagaaacagatacaaaatctccaactcagtattaaggtattctcatgcctagaatattggtagaaacaagaatacattcatatggcaaataactaaccatggtggaacaaaattctgggatttaagttggataccaangaaattgtattaaaagagctgttcatggaataaga

SEQ ID NO: 306 - protein, 8 aa, Homo sapien
VLGWVAEL

SEQ ID NO: 307 - DNA, 637 bp, Homo sapien
acagggratgaagggaaagggagaggatgaggaagcccccctggggatttggtttggtccttgtgatcaggtggtctatggggcttatccctacaaagaagaatccagaaataggggcacattgaggaatgatacttgagcccaaagagcattcaatcattgttttatttgccttmttttcacaccattggtgagggagggattaccaccctggggttatgaagatggttgaacaccccacacatagcaccggagatatgagatcaacagtttcttagccatagagattcacagcccagagcaggaggacgcttgcacaccatgcaggatgacatgggggatgcgctcgggattggtgtgaagaagcaaggactgttagaggcaggctttatagtaacaagacggtggggcaaactctgatttccgtgggggaatgtcatggtcttgctttactaagttttgagactggcaggtagtgaaactcattaggctgagaaccttgtggaatgcacttgacccasctgatagaggaagtagccaggtgggagcctttcccagtgggtgtgggacatatctggcaagattttgtggcactcctggttacagatactggggcagcaaataaaactgaatcttg

SEQ ID NO: 308 - DNA, 647 bp, Homo sapien
  misc_feature (1)...(647): n = A,T,C or G
acgattttcattatcatgtaaatcgggtcactcaaggggccaaccacagctgggagccactgctcaggggaaggttcatatgggactttctactgcccaaggttctatacaggatataaaggngcctcacagtatagatctggtagcaaagaagaagaaacaaacactgatctctttctgccacccctctgaccctttggaactcctctgaccctttagaacaagcctacctaatatctgctagagaaaagaccaacaacggcctcaaaggatctcttaccatgaaggtctcagctaattcttggctaagatgtgggttccacattaggttctgaatatggggggaagggtcaatttgctcattttgtgtgtggataaagtcaggatgcccaggggccagagcagggggctgcttgctttgggaacaatggctgagcatataaccataggttatggggaacaaaacaacatcaaagtcactgtatcaattgccatgaagacttgagggacctgaatctaccgattcatcttaaggcagcaggaccagtttgagtggcaacaatgcagcagcagaatcaatggaaacaacagaatgattgcaatgtccttttttttctcctgcttctgacttgataaaaggggaccgt

SEQ ID NO: 309 - DNA, 460 bp, Homo sapien
actttatagtttaggctggacattggaaaaaaaaaaaagccagaacaacatgtgatagataatatgattggctgcacacttccagactgatgaatgatgaacgtgatggactattgtatggagcacatcttcagcaagagggggaaatactcatcatttttggccagcagttgtttgatcaccaaacatcatgccagaatactcagcaaaccttcttagctcttgagaagtcaaagtccgggggaatttattcctggcaattttaattggactccttatgtgagagcagcggctacccagctggggtggtggagcgaacccgtcactagtggacatgcagtggcagagctcctggtaaccacctagaggaatacacaggcacatgtgtgatgccaagcgtgacacctgtagcactcaaatttgtcttgtttttgtctttcggtgtgtaagattcttaagt

SEQ ID NO: 310 - DNA, 539 bp, Homo sapien
acgggacttatcaaataaagataggaaaagaagaaaactcaaatattataggcagaaatgctaaaggttttaaaatatgtcaggattggaagaaggcatggataaagaacaaagttcagttaggaaagagaaacacagaaggaagagacacaataaaagtcattatgtattctgtgagaagtcagacagtaagatttgtgggaaatgggttggtttgttgtatggtatgtattttagcaataatctttatggcagagaaagctaaaatcctttagcttgcgtgaatgatcacttgctgaattcctcaaggtaggcatgatgaaggagggtttagaggagacacagacacaatgaactgacctagatagaaagccttagtatactcagctaggaatagtgattctgagggcacactgtgacatgattatgtcattacatgtatggtagtgatggggatgataggaaggaagaacttatggcatattttcacccccacaaaagtcagttaaatattgggacactaaccatccaggtcaaga

SEQ ID NO: 311 - DNA, 526 bp, Homo sapien
  misc_feature (1)...(526): n = A,T,C or G
caaatttgagccaatgacatagaattttacaaatcaagaagcttattctggggccatttcttttgacgttttctctaaactactaaagaggcattaatgatccataaattatattatctacatttacagcatttaaaatgtgttcagcatgaaatattagctacaggggaagctaaataaattaaacatggaataaagatttgtccttaaatataatctacaagaagactttgatatttgtttttcacaagtgaagcattcttataaagtgtcataacctttttggggaaactatgggaaaaaatggggaaactctgaagggttttaagtatcttacctgaagctacagactccataacctctctttacagggagctcctgcagcccctacagaaatgagtggctgagattcttgattgcacagcaagagcttctcatctaaaccctttccctttttagtatctgtgtatcaagtataaaagttctataaactgtagtntacttattttaatccccaaagcacagt

SEQ ID NO: 312 - DNA, 500 bp, Homo sapien
  misc_feature (1)...(500): n = A,T,C or G
cctctctctccccaccccctgactctagagaactgggttttctcccagtactccagcaattcatttctgaaagcagttgagccactttattccaaagtacactgcagatgttcaaactctccatttctctttcccttccacctgccagttttgctgactctcaacttgtcatgagtgtaagcattaaggacattatgcttcttcgattctgaagacaggccctgctcatggatgactctggcttcttaggaaaatatttttcttccaaaatcagtaggaaatctaaacttatcccctctttgcagatgtctagcagcttcagacatttggttaagaacccatgggaaaaaaaaaaatccttgctaatgtggtttcctttgtaaaccangattcttatttgnctggtatagaatatcagctctgaacgtgtggtaaagatttttgtgtttgaatataggagaaatcagtttgctgaaaagttagtcttaattatctattgg

SEQ ID NO: 313 - DNA, 718 bp, Homo sapien
  misc_feature (1)...(718): n = A,T,C or G
ggagatttgtgtggtttgcagccgagggagaccaggaagatctgcatggtgggaaggacctgatgatacagaggtgagaaataagaaaggctgctgactttaccatctgaggccacacatctgctgaaatggagataattaacatcactagaaacagcaagatgacaatataatgtctaagtagtgacatgtttttgcacatttccagcccttttaaatatccacacacacaggaagcacaaaaggaagcacagagatccctgggagaaatgcccggccgccatcttgggtcatcgatgagcctcgccctgtgcctgntcccgcttgtgagggaaggacattagaaaatgaattgatgtgttccttaaaggatggcaggaaaacagatcctgttgtggatatttatttgaacgggattacagatttgaaatgaagtcacaaagtgagcattaccaatgagaggaaaacagacgagaaaatcttgatggttcacaagacatgcaacaaacaaaatggaatactgtgatgacacgagcagccaactggggaggagataccacggggcagaggtcaggattctggccctgctgcctaactgtgcgttataccaatcatttctatttctaccctcaaacaagctgtngaatatctgacttacggttcttntggcccacattttcatnatccaccccntcnttttaannttantccaaantgt

SEQ ID NO: 314 - DNA, 358 bp, Homo sapien
gtttatttacattacagaaaaaacatcaagacaatgtatactatttcaaatatatccatacataatcaaatatagctgtagtacatgttttcattggtgtagattaccacaaatgcaaggcaacatgtgtagatctcttgtcttattcttttgtctataatactgtattgtgtagtccaagctctcggtagtccagccactgtgaaacatgctccctttagattaacctcgtggacgctcttgttgtattgctgaactgtagtgccctgtattttgcttctgtctgtgaattctgttgcttctggggcatttccttgtgatgcagaggaccaccacacagatgacagcaatctgaatt

SEQ ID NO: 315 - DNA, 341 bp, Homo sapien
taccacctccccgctggcactgatgagccgcatcaccatggtcaccagcaccatgaaggcataggtgatgatgaggacatggaatgggcccccaaggatggtctgtccaaagaagcgagtgacccccattctgaagatgtctggaacctctaccagcaggatgatgatagccccaatgacagtcaccagctccccgaccagccggatatcgtccttaggggtcatgtaggcttcctgaagtagcttctgctgtaagagggtgttgtcccgggggctcgtgcggttattggtcctgggcttgagggggcggtagatgcagcacatggtgaagcagatgatgt

SEQ ID NO: 316 - DNA, 151 bp, Homo sapien
agactgggcaagactcttacgccccacactgcaatttggtcttgttgccgtatccatttatgtgggcctttctcgagtttctgattataaacaccactggagcgatgtgttgactggactcattcagggagctctggttgcaatattagtt

SEQ ID NO: 317 - DNA, 151 bp, Homo sapien
agaactagtggatcctaatgaaatacctgaaacatatattggcatttatcaatggctcaaatcttcatttatctctggccttaaccctggctcctgaggctgcggccagcagatcccaggccagggctctgttcttgccacacctgcttga

SEQ ID NO: 318 - DNA, 151 bp, Homo sapien
actggtgggaggcgctgtttagttggctgttttcagaggggtctttcggagggacctcctgctgcaggctggagtgtctttattcctggcgggagaccgcacattccactgctgaggctgtgggggcggtttatcaggcagtgataaacat

SEQ ID NO: 319 - DNA, 151 bp, Homo sapien
aactagtggatccagagctataggtacagtgtgatctcagctttgcaaacacattttctacatagatagtactaggtattaatagatatgtaaagaaagaaatcacaccattaataatggtaagattgggtttatgtgattttagtgggta

SEQ ID NO: 320 - DNA, 150 bp, Homo sapien
aactagtggatccactagtccagtgtggtggaattccattgtgttggggttctagatcgcgagcggctgccctttttttttttttttttgggggggaattttttttttttaatagttattgagtgttctacagcttacagtaaataccat

SEQ ID NO: 321 - DNA, 151 bp, Homo sapien
agcaactttgtttttcatccaggttattttaggcttaggatttcctctcacactgcagtttagggtggcattgtaaccagctatggcataggtgttaaccaaaggctgagtaaacatgggtgcctctgagaaatcaaagtcttcatacact

SEQ ID NO: 322 - DNA, 151 bp, Homo sapien
  misc_feature (1)...(151): n = A,T,C or G
atccagcatcttctcctgtttcttgccttcctttttcttcttcttasattctgcttgaggtttgggcttggtcagtttgccacagggcttggagatggtgacagtcttctggcattcggcattgtgcagggctcgcttcanacttccagtt

SEQ ID NO: 323 - DNA, 151 bp, Homo sapien
  misc_feature (1)...(151): n = A,T,C or G
tgaggacttgtkttctttttctttatttttaatcctcttackttgtaaatatattgcctanagactcanttactacccagtttgtggttttwtgggagaaatgtaactggacagttagctgttcaatyaaaaagacacttancccatgtgg

SEQ ID NO: 324 - DNA, 461 bp, Homo sapien
  misc_feature (1)...(461): n = A,T,C or G
acctgtgtggaatttcagctttcctcatgcaaaaggattttgtatccccggcctacttgaagaagtggtcagctaaaggaatccaggttgttggttggactgttaatacctttgatgaaaagagttactacgaatcccatcttggttccagctatatcactgacagcatggtagaagactgcgaacctcacttctagactttcacggtgggacgaaacgggttcagaaactgccaggggcctcatacagggatatcaaaataccctttgtgctacccaggccctggggaatcaggtgactcacacaaatgcaatagttggtcactgcatttttacctgaaccaaagctaaacccggtgttgccaccatgcaccatggcatgccagagttcaacactgttgctcttgaaaattgggtctgaaaaaacgcacaagagcccctgccctgccctagctgangcac

SEQ ID NO: 325 - DNA, 400 bp, Homo sapien
acactgtttccatgttatgtttctacacattgctacctcagtgctcctggaaacttagcttttgatgtctccaagtagtccaccttcatttaactctttgaaactgtatcatctttgccaagtaagagtggtggcctatttcagctgctttgacaaaatgactggctcctgacttaacgttctataaatgaatgtgctgaagcaaagtgcccatggtggcggcgaagaagagaaagatgtgttttgttttggactctctgtggtcccttccaatgctgtgggtttccaaccaggggaagggtcccttttgcattgccaagtgccataaccatgagcactacgctaccatggttctgcctcctggccaagcaggctggtttgcaagaatgaaatgaatgat

SEQ ID NO: 326 - DNA, 1215 bp, Homo sapien
ggaggactgcagcccgcactcgcagccctggcaggcggcactggtcatggaaaacgaattgttctgctcgggcgtcctggtgcatccgcagtgggtgctgtcagccgcacactgtttccagaactcctacaccatcgggctgggcctgcacagtcttgaggccgaccaagagccagggagccagatggtggaggccagcctctccgtacggcacccagagtacaacagacccttgctcgctaacgacctcatgctcatcaagttggacgaatccgtgtccgagtctgacaccatccggagcatcagcattgcttcgcagtgccctaccgcggggaactcttgcctcgtttctggctggggtctgctggcgaacggcagaatgcctaccgtgctgcagtgcgtgaacgtgtcggtggtgtctgaggaggtctgcagtaagctctatgacccgctgtaccaccccagcatgttctgcgccggcggagggcaagaccagaaggactcctgcaacggtgactctggggggcccctgatctgcaacgggtacttgcagggccttgtgtctttcggaaaagccccgtgtggccaagttggcgtgccaggtgtctacaccaacctctgcaaattcactgagtggatagagaaaaccgtccaggccagttaactctggggactgggaacccatgaaattgacccccaaatacatcctgcggaaggaattcaggaatatctgttcccagcccctcctccctcaggcccaggagtccaggcccccagcccctcctccctcaaaccaagggtacagatccccagcccctcctccctcagacccaggagtccagaccccccagcccctcctccctcagacccaggagtccagcccctcctccctcagacccaggagtccagaccccccagcccctcctccctcagacccaggggtccaggcccccaacccctcctccctcagactcagaggtccaagcccccaacccctccttccccagacccagaggtccaggtcccagcccctcctccctcagacccagcggtccaatgccacctagactctccctgtacacagtgcccccttgtggcacgttgacccaaccttaccagttggtttttcattttttgtccctttcccctagatccagaaataaagtctaagagaagcgcaaaaaaaaaaaaaaaaaaaaaaaaaaaaaaaaaaaa

SEQ ID NO: 327 - protein, 220 aa, Homo sapien
EDCSPHSQPWQAALVMENELFCSGVLVHPQWVLSAAHCFQNSYTIGLGLHSLEADQEPGSQMVEASLSVRHPEYNRPLLANDLMLIKLDESVSESDTIRSISIASQCPTAGNSCLVSGWGLLANGRMPTVLQCVNVSVVSEEVCSKLYDPLYHPSMFCAGGGQDQKDSCNGDSGGPLICNGYLQGLVSFGKAPCGQVGVPGVYTNLCKFTEWIEKTVQAS

SEQ ID NO: 328 - DNA, 234 bp, Homo sapien
cgctcgtctctggtagctgcagccaaatcataaacggcgaggactgcagcccgcactcgcagccctggcaggcggcactggtcatggaaaacgaattgttctgctcgggcgtcctggtgcatccgcagtgggtgctgtcagccacacactgtttccagaactcctacaccatcgggctgggcctgcacagtcttgaggccgaccaagagccagggagccagatggtggaggcca

SEQ ID NO: 329 - protein, 77 aa, Homo sapien
LVSGSCSQIINGEDCSPHSQPWQAALVMENELFCSGVLVHPQWVLSATHCFQNSYTIGLGLHSLEADQEPGSQMVEA

SEQ ID NO: 330 - DNA, 70 bp, Homo sapien
cccaacacaatggcccgatcccatccctgactccgccctcaggatcgctcgtctctggtagctgcagcca

SEQ ID NO: 331 - protein, 22 aa, Homo sapien
QHNGPIPSLTPPSGSLVSGSCS

SEQ ID NO: 332 - DNA, 2507 bp, Homo sapien
tggtgccgctgcagccggcagagatggttgagctcatgttcccgctgttgctcctccttctgcccttccttctgtatatggctgcgccccaaatcaggaaaatgctgtccagtggggtgtgtacatcaactgttcagcttcctgggaaagtagttgtggtcacaggagctaatacaggtatcgggaaggagacagccaaagagctggctcagagaggagctcgagtatatttagcttgccgggatgtggaaaagggggaattggtggccaaagagatccagaccacgacagggaaccagcaggtgttggtgcggaaactggacctgtctgatactaagtctattcgagcttttgctaagggcttcttagctgaggaaaagcacctccacgttttgatcaacaatgcaggagtgatgatgtgtccgtactcgaagacagcagatggctttgagatgcacataggagtcaaccacttgggtcacttcctcctaacccatctgctgctagagaaactaaaggaatcagccccatcaaggatagtaaatgtgtcttccctcgcacatcacctgggaaggatccacttccataacctgcagggcgagaaattctacaatgcaggcctggcctactgtcacagcaagctagccaacatcctcttcacccaggaactggcccggagactaaaaggctctggcgttacgacgtattctgtacaccctggcacagtccaatctgaactggttcggcactcatctttcatgagatggatgtggtggcttttctcctttttcatcaagactcctcagcagggagcccagaccagcctgcactgtgccttaacagaaggtcttgagattctaagtgggaatcatttcagtgactgtcatgtggcatgggtctctgcccaagctcgtaatgagactatagcaaggcggctgtgggacgtcagttgtgacctgctgggcctcccaatagactaacaggcagtgccagttggacccaagagaagactgcagcagactacacagtacttcttgtcaaaatgattctccttcaaggttttcaaaacctttagcacaaagagagcaaaaccttccagccttgcctgcttggtgtccagttaaaactcagtgtactgccagattcgtctaaatgtctgtcatgtccagatttactttgcttctgttactgccagagttactagagatatcataataggataagaagaccctcatatgacctgcacagctcattttccttctgaaagaaactactacctaggagaatctaagctatagcagggatgatttatgcaaatttgaactagcttctttgttcacaattcagttcctcccaaccaaccagtcttcacttcaagagggccacactgcaacctcagcttaacatgaataacaaagactggctcaggagcagggcttgcccaggcatggtggatcaccggaggtcagtagttcaagaccagcctggccaacatggtgaaaccccacctctactaaaaattgtgtatatctttgtgtgtcttcctgtttatgtgtgccaagggagtattttcacaaagttcaaaacagccacaataatcagagatggagcaaaccagtgccatccagtctttatgcaaatgaaatgctgcaaagggaagcagattctgtatatgttggtaactacccaccaagagcacatgggtagcagggaagaagtaaaaaaagagaaggagaatactggaagataatgcacaaaatgaagggactagttaaggattaactagccctttaaggattaactagttaaggattaatagcaaaagayattaaatatgctaacatagctatggaggaattgagggcaagcacccaggactgatgaggtcttaacaaaaaccagtgtggcaaaaaaaaaaaaaaaaaaaaaaaaaaatcctaaaaacaaacaaacaaaaaaaacaattcttcattcagaaaaattatcttagggactgatattggtaattatggtcaatttaataatattttggggcatttccttacattgtcttgacaagattaaaatgtctgtgccaaaattttgtattttatttggagacttcttatcaaaagtaatgctgccaaaggaagtctaaggaattagtagtgttcccatcacttgtttggagtgtgctattctaaaagattttgatttcctggaatgacaattatattttaactttggtgggggaaagagttataggaccacagtcttcacttctgatacttgtaaattaatcttttattgcacttgttttgaccattaagctatatgtttagaaatggtcattttacggaaaaattagaaaaattctgataatagtgcagaataaatgaattaatgttttacttaatttatattgaactgtcaatgacaaataaaaattctttttgattattttttgttttcatttaccagaataaaaacgtaagaattaaaagtttgattacaaaaaaaaaaaaaaa

SEQ ID NO: 333 - DNA, 3030 bp, Homo sapien
gcaggcgacttgcgagctgggagcgatttaaaacgctttggattcccccggcctgggtggggagagcgagctgggtgccccctagattccccgcccccgcacctcatgagccgaccctcggctccatggagcccggcaattatgccaccttggatggagccaaggatatcgaaggcttgctgggagcgggaggggggcggaatctggtcgcccactcccctctgaccagccacccagcggcgcctacgctgatgcctgctgtcaactatgcccccttggatctgccaggctcggcggagccgccaaagcaatgccacccatgccctggggtgccccaggggacgtccccagctcccgtgccttatggttactttggaggcgggtactactcctgccgagtgtcccggagctcgctgaaaccctgtgcccaggcagccaccctggccgcgtaccccgcggagactcccacggccggggaagagtaccccagycgccccactgagtttgccttctatccgggatatccgggaacctaccagcctatggccagttacctggacgtgtctgtggtgcagactctgggtgctcctggagaaccgcgacatgactccctgttgcctgtggacagttaccagtcttgggctctcgctggtggctggaacagccagatgtgttgccagggagaacagaacccaccaggtcccttttggaaggcagcatttgcagactccagcgggcagcaccctcctgacgcctgcgcctttcgtcgcggccgcaagaaacgcattccgtacagcaaggggcagttgcgggagctggagcgggagtatgcggctaacaagttcatcaccaaggacaagaggcgcaagatctcggcagccaccagcctctcggagcgccagattaccatctggtttcagaaccgccgggtcaaagagaagaaggttctcgccaaggtgaagaacagcgctaccccttaagagatctccttgcctgggtgggaggagcgaaagtgggggtgtcctggggagaccaggaacctgccaagcccaggctggggccaaggactctgctgagaggcccctagagacaacacccttcccaggccactggctgctggactgttcctcaggagcggcctgggtacccagtatgtgcagggagacggaaccccatgtgacagcccactccaccagggttcccaaagaacctggcccagtcataatcattcatcctgacagtggcaataatcacgataaccagtactagctgccatgatcgttagcctcatattttctatctagagctctgtagagcactttagaaaccgctttcatgaattgagctaattatgaataaatttggaaggcgatccctttgcagggaagctttctctcagacccccttccattacacctctcaccctggtaacagcaggaagactgaggagaggggaacgggcagattcgttgtgtggctgtgatgtccgtttagcatttttctcagctgacagctgggtaggtggacaattgtagaggctgtctcttcctccctccttgtccaccccatagggtgtacccactggtcttggaagcacccatccttaatacgatgatttttctgtcgtgtgaaaatgaagccagcaggctgcccctagtcagtccttccttccagagaaaaagagatttgagaaagtgcctgggtaattcaccattaatttcctcccccaaactctctgagtcttcccttaatatttctggtggttctgaccaaagcaggtcatggtttgttgagcatttgggatcccagtgaagtagatgtttgtagccttgcatacttagcccttcccaggcacaaacggagtggcagagtggtgccaaccctgttttcccagtccacgtagacagattcacagtgcggaattctggaagctggagacagacgggctctttgcagagccgggactctgagagggacatgagggcctctgcctctgtgttcattctctgatgtcctgtacctgggctcagtgcccggtgggactcatctcctggccgcgcagcaaagccagcgggttcgtgctggtccttcctgcaccttaggctgggggtggggggcctgccggcgcattctccacgattgagcgcacaggcctgaagtctggacaacccgcagaaccgaagctccgagcagcgggtcggtggcgagtagtggggtcggtggcgagcagttggtggtgggccgcggccgccactacctcgaggacatttccctcccggagccagctctcctagaaaccccgcggcggccgccgcagccaagtgtttatggcccgcggtcgggtgggatcctagccctgtctcctctcctgggaaggagtgagggtgggacgtgacttagacacctacaaatctatttaccaaagaggagcccgggactgagggaaaaggccaaagagtgtgagtgcatgcggactgggggttcaggggaagaggacgaggaggaggaagatgaggtcgatttcctgatttaaaaaatcgtccaagccccgtggtccagcttaaggtcctcggttacatgcgccgctcagagcaggtcactttctgccttccacgtcctccttcaaggaagccccatgtgggtagctttcaatatcgcaggttcttactcctctgcctctataagctcaaacccaccaacgatcgggcaagtaaaccccctccctcgccgacttcggaactggcgagagttcagcgcagatgggcctgtggggagggggcaagatagatgagggggagcggcatggtgcggggtgaccccttggagagaggaaaaaggccacaagaggggctgccaccgccactaacggagatggccctggtagagacctttgggggtctggaacctctggactccccatgctctaactcccacactctgctatcagaaacttaaacttgaggattttctctgtttttcactcgcaataaaytcagagcaaacaaaaaaaaaaaaaaaaaaaaactcgag

SEQ ID NO: 334 - DNA, 2417 bp, Homo sapien
ggcggccgctctagagctagtgggatcccccgggctgcacgaattcggcacgagtgagttggagttttacctgtattgttttaatttcaacaagcctgaggactagccacaaatgtacccagtttacaaatgaggaaacaggtgcaaaaaggttgttacctgtcaaaggtcgtatgtggcagagccaagatttgagcccagttatgtctgatgaacttagcctatgctctttaaacttctgaatgctgaccattgaggatatctaaacttagatcaattgcattttccctccaagactatttacttatcaatacaataataccacctttaccaatctattgttttgatacgagactcaaatatgccagatatatgtaaaagcaacctacaagctctctaatcatgctcacctaaaagattcccgggatctaataggctcaaagaaacttcttctagaaatataaaagagaaaattggattatgcaaaaattcattattaatttttttcatccatcctttaattcagcaaacatttatctgttgttgactttatgcagtatggccttttaaggattgggggacaggtgaagaacggggtgccagaatgcatcctcctactaatgaggtcagtacacatttgcattttaaaatgccctgtccagctgggcatggtggatcatgcctgtaatctcaacattggaaggccaaggcaggaggattgcttcagcccaggagttcaagaccagcctgggcaacatagaaagaccccatctctcaatcaatcaatcaatgccctgtctttgaaaataaaactctttaagaaaggtttaatgggcagggtgtggtagctcatgcctataatacagcactttgggaggctgaggcaggaggatcactttagcccagaagttcaagaccagcctgggcaacaagtgacacctcatctcaattttttaataaaatgaatacatacataaggaaagataaaaagaaaagtttaatgaaagaatacagtataaaacaaatctcttggacctaaaagtatttttgttcaagccaaatattgtgaatcacctctctgtgttgaggatacagaatatctaagcccaggaaactgagcagaaagttcatgtactaactaatcaacccgaggcaaggcaaaaatgagactaactaatcaatccgaggcaaggggcaaattagacggaacctgactctggtctattaagcgacaactttccctctgttgtatttttcttttattcaatgtaaaaggataaaaactctctaaaactaaaaacaatgtttgtcaggagttacaaaccatgaccaactaattatggggaatcataaaatatgactgtatgagatcttgatggtttacaaagtgtacccactgttaatcactttaaacattaatgaacttaaaaatgaatttacggagattggaatgtttctttcctgttgtattagttggctcaggctgccataacaaaataccacagactgggaggcttaagtaacagaaattcatttctcacagttctgggggctggaagtccacgatcaaggtgcaggaaaggcaggcttcattctgaggcccctctcttggctcacatgtggccaccctcccactgcgtgctcacatgacctctttgtgctcctggaaagagggtgtgggggacagagggaaagagaaggagagggaactctctggtgtctcgtctttcaaggaccctaacctgggccactttggcccaggcactgtggggtggggggttgtggctgctctgctctgagtggccaagataaagcaacagaaaaatgtccaaagctgtgcagcaaagacaagccaccgaacagggatctgctcatcagtgtggggacctccaagtcggccaccctggaggcaagcccccacagagcccatgcaaggtggcagcagcagaagaagggaattgtccctgtccttggcacattcctcaccgacctggtgatgctggacactgcgatgaatggtaatgtggatgagaatatgatggactcccagaaaaggagacccagctgctcaggtggctgcaaatcattacagccttcatcctggggaggaactgggggcctggttctgggtcagagagcagcccagtgagggtgagagctacagcctgtcctgccagctggatccccagtcccggtcaaccagtaatcaaggctgagcagatcaggcttcccggagctggtcttgggaagccagccctggggtgagttggctcctgctgtggtactgagacaatattgtcataaattcaatgcgcccttgtatccctttttcttttttatctgtctacatctataatcactatgcatactagtctttgttagtgtttctattcmacttaatagagatatgttatact

SEQ ID NO: 335 - DNA, 2984 bp, Homo sapien
atccctccttccccactctcctttccagaaggcacttggggtcttatctgttggactctgaaaacacttcaggcgcccttccaaggcttccccaaacccctaagcagccgcagaagcgctcccgagctgccttctcccacactcaggtgatcgagttggagaggaagttcagccatcagaagtacctgtcggcccctgaacgggcccacctggccaagaacctcaagctcacggagacccaagtgaagatatggttccagaacagacgctataagactaagcgaaagcagctctcctcggagctgggagacttggagaagcactcctctttgccggccctgaaagaggaggccttctcccgggcctccctggtctccgtgtataacagctatccttactacccatacctgtactgcgtgggcagctggagcccagctttttggtaatgccagctcaggtgacaaccattatgatcaaaaactgccttccccagggtgtctctatgaaaagcacaaggggccaaggtcagggagcaagaggtgtgcacaccaaagctattggagatttgcgtggaaatctcasattcttcactggtgagacaatgaaacaacagagacagtgaaagttttaatacctaagtcattcccccagtgcatactgtaggtcattttttttgcttctggctacctgtttgaaggggagagagggaaaatcaagtggtattttccagcactttgtatgattttggatgagctgtacacccaaggattctgttctgcaactccatcctcctgtgtcactgaatatcaactctgaaagagcaaacctaacaggagaaaggacaaccaggatgaggatgtcaccaactgaattaaacttaagtccagaagcctcctgttggccttggaatatggccaaggctctctctgtccctgtaaaagagaggggcaaatagagagtctccaagagaacgccctcatgctcagcacatatttgcatgggagggggagatgggtgggaggagatgaaaatatcagcttttcttattcctttttattccttttaaaatggtatgccaacttaagtatttacagggtggcccaaatagaacaagatgcactcgctgtgattttaagacaagctgtataaacagaactccactgcaagagggggggccgggccaggagaatctccgcttgtccaagacaggggcctaaggagggtctccacactgctgctaggggctgttgcatttttttattagtagaaagtggaaaggcctcttctcaacttttttcccttgggctggagaatttagaatcagaagtttcctggagttttcaggctatcatatatactgtatcctgaaaggcaacataattcttccttccctccttttaaaattttgtgttcctttttgcagcaattactcactaaagggcttcattttagtccagatttttagtctggctgcacctaacttatgcctcgcttatttagcccgagatctggtctttttttttttttttttttttccgtctccccaaagctttatctgtcttgactttttaaaaaagtttgggggcagattctgaattggctaaaagacatgcatttttaaaactagcaactcttatttctttcctttaaaaatacatagcattaaatcccaaatcctatttaaagacctgacagcttgagaaggtcactactgcatttataggaccttctggtggttctgctgttacgtttgaagtctgacaatccttgagaatctttgcatgcagaggaggtaagaggtattggattttcacagaggaagaacacagcgcagaatgaagggccaggcttactgagctgtccagtggagggctcatgggtgggacatggaaaagaaggcagcctaggccctggggagcccagtccactgagcaagcaagggactgagtgagccttttgcaggaaaaggctaagaaaaaggaaaaccattctaaaacacaacaagaaactgtccaaatgctttgggaactgtgtttattgcctataatgggtccccaaaatgggtaacctagacttcagagagaatgagcagagagcaaaggagaaatctggctgtccttccattttcattctgttatctcaggtgagctggtagaggggagacattagaaaaaaatgaaacaacaaaacaattactaatgaggtacgctgaggcctgggagtctcttgactccactacttaattccgtttagtgagaaacctttcaattttcttttattagaagggccagcttactgttggtggcaaaattgccaacataagttaatagaaagttggccaatttcaccccattttctgtggtttgggctccacattgcaatgttcaatgccacgtgctgctgacaccgaccggagtactagccagcacaaaaggcagggtagcctgaattgctttctgctctttacatttcttttaaaataagcatttagtgctcagtccctactgagtactctttctctcccctcctctgaatttaattctttcaacttgcaatttgcaaggattacacatttcactgtgatgtatattgtgttgcaaaaaaaaaaaaaagtgtctttgtttaaaattacttggtttgtgaatccatcttgctttttccccattggaactagtcattaacccatctctgaactggtagaaaaacatctgaagagctagtctatcagcatctgacaggtgaattggatggttctcagaaccatttcacccagacagcctgtttctatcctgtttaataaattagtttgggttctctacatgcataacaaaccctgctccaatctgtcacataaaagtctgtgacttgaagtttagtcagcacccccaccaaactttatttttctatgtgttttttgcaacatatgagtgttttgaaaataaagtacccatgtctttattagaaaaaaaaaaaaaaaaaaaaaa

SEQ ID NO: 336 - protein, 147 aa, Homo sapien
PSFPTLLSRRHLGSYLLDSENTSGALPRLPQTPKQPQKRSRAAFSHTQVIELERKFSHQKYLSAPERAHLAKNLKLTETQVKIWFQNRRYKTKRKQLSSELGDLEKHSSLPALKEEAFSRASLVSVYNSYPYYPYLYCVGSWSPAFW

SEQ ID NO: 337 - protein, 9 aa, Homo sapien
ALTGFTFSA

SEQ ID NO: 338 - protein, 9 aa, Homo sapien
LLANDLMLI

SEQ ID NO: 339 - protein, 318 aa, Homo sapien
MVELMFPLLLLLLPFLLYMAAPQIRKMLSSGVCTSTVQLPGKVVVVTGANTGIGKETAKELAQRGARVYLACRDVEKGELVAKEIQTTTGNQQVLVRKLDLSDTKSIRAFAKGFLAEEKHLHVLINNAGVMMCPYSKTADGFEMHIGVNHLGHFLLTHLLLEKLKESAPSRIVNVSSLAHHLGRIHFHNLQGEKFYNAGLAYCHSKLANILFTQELARRLKGSGVTTYSVHPGTVQSELVRHSSFMRWMWWLFSFFIKTPQQGAQTSLHCALTEGLEILSGNHFSDCHVAWVSAQARNETIARRLWDVSCDLLGLPID

SEQ ID NO: 340 - DNA, 483 bp, Homo sapien
gccgaggtctgccttcacacggaggacacgagactgcttcctcaagggctcctgcctgcctggacactggtgggaggcgctgtttagttggctgttttcagaggggtctttcggagggacctcctgctgcaggctggagtgtctttattcctggcgggagaccgcacattccactgctgaggttgtgggggcggtttatcaggcagtgataaacataagatgtcatttccttgactccggccttcaattttctctttggctgacgacggagtccgtggtgtcccgatgtaactgacccctgctccaaacgtgacatcactgatgctcttctcgggggtgctgatggcccgcttggtcacgtgctcaatctcgccattcgactcttgctccaaactgtatgaagacacctgactgcacgttttttctgggcttccagaatttaaagtgaaaggcagcactcctaagctccgactccgatgcctg

SEQ ID NO: 341 - DNA, 344 bp, Homo sapien
ctgctgctgagtcacagatttcattataaatagcctccctaaggaaaatacactgaatgctatttttactaaccattctatttttatagaaatagctgagagtttctaaaccaactctctgctgccttacaagtattaaatattttacttctttccataaagagtagctcaaaatatgcaattaatttaataatttctgatgatggttttatctgcagtaatatgtatatcatctattagaatttacttaatgaaaaactgaagagaacaaaatttgtaaccactagcacttaagtactcctgattcttaacattgtctttaatgaccacaagacaaccaacag

SEQ ID NO: 342 - DNA, 592 bp, Homo sapien
acagcaaaaaagaaactgagaagcccaatytgctttcttgttaacatccacttatccaaccaatgtggaaacttcttatacttggttccattatgaagttggacaattgctgctatcacacctggcaggtaaaccaatgccaagagagtgatggaaaccattggcaagactttgttgatgaccaggattggaattttataaaaatattgttgatgggaagttgctaaagggtgaattacttccctcagaagagtgtaaagaaaagtcagagatgctataatagcagctattttaattggcaagtgccactgtggaaagagttcctgtgtgtgctgaagttctgaagggcagtcaaattcatcagcatgggctgtttggtgcaaatgcaaaagcacaggtctttttagcatgctggtctctcccgtgtccttatgcaaataatcgtcttcttctaaatttctcctaggcttcattttccaaagttcttcttggtttgtgatgtcttttctgctttccattaattctataaaatagtatggcttcagccacccactcttcgccttagcttgaccgtgagtctcggctgccgctg

SEQ ID NO: 343 - DNA, 382 bp, Homo sapien
ttcttgacctcctcctccttcaagctcaaacaccacctcccttattcaggaccggcacttcttaatgtttgtggctttctctccagcctctcttaggaggggtaatggtggagttggcatcttgtaactctcctttctcctttcttcccctttctctgcccgcctttcccatcctgctgtagacttcttgattgtcagtctgtgtcacatccagtgattgttttggtttctgttccctttctgactgcccaaggggctcagaaccccagcaatcccttcctttcactaccttcttttttgggggtagttggaagggactgaaattgtggggggaaggtaggaggcacatcaataaagaggaaaccaccaagctgaaaaaaaa

SEQ ID NO: 344 - DNA, 536 bp, Homo sapien
ctgggcctgaagctgtagggtaaatcagaggcaggcttctgagtgatgagagtcctgagacaataggccacataaacttggctggatggaacctcacaataaggtggtcacctcttgtttgtttagggggatgccaaggataaggccagctcagttatatgaagagaagcagaacaaacaagtctttcagagaaatggatgcaatcagagtgggatcccggtcacatcaaggtcacactccaccttcatgtgcctgaatggttgccaggtcagaaaaatccaccccttacgagtgcggcttcgaccctatatcccccgcccgcgtccctttctccataaaattcttcttagtagctattaccttcttattatttgatctagaaattgccctccttttacccctaccatgagccctacaaacaactaacctgccactaatagttatgtcatccctcttattaatcatcatcctagccctaagtctggcctatgagtgactacaaaaaggattagactgagccgaataacaaaaaaaa

SEQ ID NO: 345 - DNA, 251 bp, Homo sapien
accttttgaggtctctctcaccacctccacagccaccgtcaccgtgggatgtgctggatgtgaatgaagcccccatctttgtgcctcctgaaaagagagtggaagtgtccgaggactttggcgtgggccaggaaatcacatcctacactgcccaggagccagacacatttatggaacagaaaataacatatcggatttggagagacactgccaactggctggagattaatccggacactggtgccatttcc

SEQ ID NO: 346 - DNA, 282 bp, Homo sapien
  misc_feature (1)...(282): n = A,T,C or G
cgcgtctctgacactgtgatcatgacaggggttcaaacagaaagtgcctgggccctccttctaagtcttgttaccaaaaaaaggaaaaagaaaagatcttctcagttacaaattctgggaagggagactatacctggctcttgccctaagtgagaggtcttccctcccgcaccaaaaaatagaaaggctttctatttcactggcccaggtagggggaaggagagtaactttgagtctgtgggtctcatttcccaaggtgccttcaatgctcatnaaaaccaa

SEQ ID NO: 347 - DNA, 201 bp, Homo sapien
  misc_feature (1)...(201): n = A,T,C or G
acacacataatattataaaatgccatctaattggaaggagctttctatcattgcaagtcataaatataacttttaaaanantactancagcttttacctangctcctaaatgcttgtaaatctgagactgactggacccacccagacccagggcaaagatacatgttaccatatcatctttataaagaatttttttttgtc

SEQ ID NO: 348 - DNA, 251 bp, Homo sapien
ctgttaatcacaacatttgtgcatcacttgtgccaagtgagaaaatgttctaaaatcacaagagagaacagtgccagaatgaaactgaccctaagtcccaggtgcccctgggcaggcagaaggagacactcccagcatggaggagggtttatcttttcatcctaggtcaggtctacaatgggggaaggttttattatagaactcccaacagcccacctcactcctgccacccacccgatggccctgcctcc

SEQ ID NO: 349 - DNA, 251 bp, Homo sapien
taaaaatcaagccatttaattgtatctttgaaggtaaacaatatatgggagctggatcacaacccctgaggatgccagagctatgggtccagaacatggtgtggtattatcaacagagttcagaagggtctgaactctacgtgttaccagagaacataatgcaattcatgcattccacttagcaattttgtaaaataccagaaacagaccccaagagtctttcaagatgaggaaaattcaactcctggttt

SEQ ID NO: 350 - DNA, 908 bp, Homo sapien
ctggacactttgcgagggcttttgctggctgctgctgctgcccgtcatgctactcatcgtagcccgcccggtgaagctcgctgctttccctacctccttaagtgactgccaaacgcccaccggctggaattgctctggttatgatgacagagaaaatgatctcttcctctgtgacaccaacacctgtaaatttgatggggaatgtttaagaattggagacactgtgacttgcgtctgtcagttcaagtgcaacaatgactatgtgcctgtgtgtggctccaatggggagagctaccagaatgagtgttacctgcgacaggctgcatgcaaacagcagagtgagatacttgtggtgtcagaaggatcatgtgccacagtccatgaaggctctggagaaactagtcaaaaggagacatccacctgtgatatttgccagtttggtgcagaatgtgacgaagatgccgaggatgtctggtgtgtgtgtaatattgactgttctcaaaccaacttcaatcccctctgcgcttctgatgggaaatcttatgataatgcatgccaaatcaaagaagcatcgtgtcagaaacaggagaaaattgaagtcatgtctttgggtcgatgtcaagataacacaactacaactactaagtctgaagatgggcattatgcaagaacagattatgcagagaatgctaacaaattagaagaaagtgccagagaacaccacataccttgtccggaacattacaatggcttctgcatgcatgggaagtgtgagcattctatcaatatgcaggagccatcttgcaggtgtgatgctggttatactggacaacactgtgaaaaaaaggactacagtgttctatacgttgttcccggtcctgtacgatttcagtatgtcttaatcgcag

SEQ ID NO: 351 - DNA, 472 bp, Homo sapien
ccagttatttgcaagtggtaagagcctatttaccataaataatactaagaaccaactcaagtcaaaccttaatgccattgttattgtgaattaggattaagtagtaattttcaaaattcacattaacttgattttaaaatcagwtttgygagtcatttaccacaagctaaatgtgtacactatgataaaaacaaccattgtattcctgtttttctaaacagtcctaatttctaacactgtatatatccttcgacatcaatgaactttgttttcttttactccagtaataaagtaggcacagatctgtccacaacaaacttgccctctcatgccttgcctctcaccatgctctgctccaggtcagcccccttttggcctgtttgttttgtcaaaaacctaatctgcttcttgcttttcttggtaatatatatttagggaagatgttgctttgcccacacacgaagcaaagtaa

SEQ ID NO: 352 - DNA, 251 bp, Homo sapien
ctcaaagctaatctctcgggaatcaaaccagaaaagggcaaggatcttaggcatggtggatgtggataaggccaggtcaatggctgcaagcatgcagagaaagaggtacatcggagcgtgcaggctgcgttccgtccttacgatgaagaccacgatgcagtttccaaacattgccactacatacatggaaaggagggggaagccaacccagaaatgggctttctctaatcctgggataccaataagcacaa

SEQ ID NO: 353 - DNA, 436 bp, Homo sapien
ttttttttttttttttttttttttttacaacaatgcagtcatttatttattgagtatgtgcacattatggtattattactatactgattatatttatcatgtgacttctaattaraaaatgtatccaaaagcaaaacagcagatatacaaaattaaagagacagaagatagacattaacagataaggcaacttatacattgacaatccaaatccaatacatttaaacatttgggaaatgagggggacaaatggaagccaratcaaatttgtgtaaaactattcagtatgtttcccttgcttcatgtctgaraaggctctcccttcaatggggatgacaaactccaaatgccacacaaatgttaacagaatactagattcacactggaacgggggtaaagaagaaattattttctataaaagggctcctaatgtagt

SEQ ID NO: 354 - DNA, 854 bp, Homo sapien
ccttttctagttcaccagttttctgcaaggatgctggttagggagtgtctgcaggaggagcaagtctgaaaccaaatctaggaaacataggaaacgagccaggcacagggctggtgggccatcagggaccaccctttgggttgatattttgcttaatctgcatcttttgagtaagatcatctggcagtagaagctgttctccaggtacatttctctagctcatgtacaaaaacatcctgaaggactttgtcaggtgccttgctaaaagccagatgcgttcggcacttccttggtctgaggttaattgcacacctacaggcactgggctcatgctttcaagtattttgtcctcactttagggtgagtgaaagatccccattataggagcacttgggagagatcatataaaagctgactcttgagtacatgcagtaatggggtagatgtgtgtggtgtgtcttcattcctgcaagggtgcttgttagggagtgtttccaggaggaacaagtctgaaaccaatcatgaaataaatggtaggtgtgaactggaaaactaattcaaaagagagatcgtgatatcagtgtggttgatacaccttggcaatatggaaggctctaatttgcccatatttgaaataataattcagctttttgtaatacaaaataacaaaggattgagaatcatggtgtctaatgtataaaagacccaggaaacataaatatatcaactgcataaatgtaaaatgcatgtgacccaagaaggccccaaagtggcagacaacattgtacccattttcccttccaaaatgtgagcggcgggcctgctgctttcaaggctgtcacacgggatgtcag

SEQ ID NO: 355 - DNA, 676 bp, Homo sapien
gaaattaagtatgagctaaattccctgttaaaacctctaggggtgacagatctcttcaaccaggtcaaagctgatctttctggaatgtcaccaaccaagggcctatatttatcaaaagccatccacaagtcatacctggatgtcagcgaagagggcacggaggcagcagcagccactggggacagcatcgctgtaaaaagcctaccaatgagagctcagttcaaggcgaaccaccccttcctgttctttataaggcacactcataccaacacgatcctattctgtggcaagcttgcctctccctaatcagatggggttgagtaaggctcagagttgcagatgaggtgcagagacaatcctgtgactttcccacggccaaaaagctgttcacacctcacgcacctctgtgcctcagtttgctcatctgcaaaataggtctaggatttcttccaaccatttcatgagttgtgaagctaaggctttgttaatcatggaaaaaggtagacttatgcagaaagcctttctggctttcttatctgtggtgtctcatttgagtgctgtccagtgacatgatcaagtcaatgagtaaaattttaagggattagattttcttgacttgtatgtatctgtgagatcttgaataagtgacctgacatctctgcttaaagaaaaccag

SEQ ID NO: 356 - DNA, 574 bp, Homo sapien
tttttttttttttttcaggaaaacattctcttactttatttgcatctcagcaaaggttctcatgtggcacctgactggcatcaaaccaaagttcgtaggccaacaaagatgggccactcacaagcttcccatttgtagatctcagtgcctatgagtatctgacacctgttcctctcttcagtctcttagggaggcttaaatctgtctcaggtgtgctaagagtgccagcccaaggkggtcaaaagtccacaaaactgcagtctttgctgggatagtaagccaagcagtgcctggacagcagagttcttttcttgggcaacagataaccagacaggactctaatcgtgctcttattcaacattcttctgtctctgcctagactggaataaaaagccaatctctctcgtggcacagggaaggagatacaagctcgtttacatgtgatagatctaacaaaggcatctaccgaagtctggtctggatagacggcacagggagctcttaggtcagcgctgctggttggaggacattcctgagtccagctttgcagcctttgtgcaacagtactttccca

SEQ ID NO: 357 - DNA, 393 bp, Homo sapien
tttttttttttttttttttttttttttttttacagaatataratgctttatcactgkacttaatatggkgkcttgttcactatacttaaaaatgcaccactcataaatatttaattcagcaagccacaaccaaracttgattttatcaacaaaaacccctaaatataaacggsaaaaaagatagatataattattccagtttttttaaaacttaaaaratattccattgccgaattaaraaraarataagtgttatatggaaagaagggcattcaagcacactaaaraaacctgaggkaagcataatctgtacaaaattaaactgtcctttttggcattttaacaaatttgcaacgktcttttttttctttttctgtttttttttttttttac

SEQ ID NO: 358 - DNA, 630 bp, Homo sapien
acagggtaaacaggaggatccttgctctcacggagcttacattctagcaggaggacaatattaatgtttataggaaaatgatgagtttatgacaaaggaagtagatagtgttttacaagagcatagagtagggaagctaatccagcacagggaggtcacagagacatccctaaggaagtggagtttaaactgagagaagcaagtgcttaaactgaaggatgtgttgaagaagaagggagagtagaacaatttgggcagagggaaccttatagaccctaaggtgggaaggttcaaagaactgaaagagagctagaacagctggagccgttctccggtgtaaagaggagtcaaagagataagattaaagatgtgaagattaagatcttggtggcattcagggattggcacttctacaagaaatcactgaagggagtaatgtgacattacttttcacttcaggatggccattctaactccagggggtagactggactaggtaagactggaggcaggtagacctcttctaaggcctgcgatagtgaaagacaaaaataagtggggaaattcaggggatagtgaaaatcagtaggacttaatgagcaagccagaggttcctccacaacaaccagt

SEQ ID NO: 359 - DNA, 620 bp, Homo sapien
acagcattccaaaatatacatctagagactaarrgtaaatgctctatagtgaagaagtaataattaaaaaatgctactaatatagaaaatttataatcagaaaaataaatattcagggagctcaccagaagaataaagtgctctgccagttattaaaggattactgctggtgaattaaatatggcattccccaagggaaatagagagattcttctggattatgttcaatatttatttcacaggattaactgttttaggaacagatataaagcttcgccacggaagagatggacaaagcacaaagacaacatgataccttaggaagcaacactaccctttcaggcataaaatttggagaaatgcaacattatgcttcatgaataatatgtagaaagaaggtctgatgaaaatgacatccttaatgtaagataactttataagaattctgggtcaaataaaattctttgaagaaaacatccaaatgtcattgacttatcaaatactatcttggcatataacctatgaaggcaaaactaaacaaacaaaaagctcacaccaaacaaaaccatcaacttattttgtattctataacatacgagactgtaaagatgtgacagtgt

SEQ ID NO: 360 - DNA, 431 bp, Homo sapien
aaaaaaaaaaagccagaacaacatgtgatagataatatgattggctgcacacttccagactgatgaatgatgaacgtgatggactattgtatggagcacatcttcagcaagagggggaaatactcatcatttttggccagcagttgtttgatcaccaaacatcatgccagaatactcagcaaaccttcttagctcttgagaagtcaaagtccgggggaatttattcctggcaattttaattggactccttatgtgagagcagcggctacccagctggggtggtggagcgaacccgtcactagtggacatgcagtggcagagctcctggtaaccacctagaggaatacacaggcacatgtgtgatgccaagcgtgacacctgtagcactcaaatttgtcttgtttttgtctttcggtgtgtagattcttagt

SEQ ID NO: 361 - DNA, 351 bp, Homo sapien
acactgatttccgatcaaaagaatcatcatctttaccttgacttttcagggaattactgaactttcttctcagaagatagggcacagccattgccttggcctcacttgaagggtctgcatttgggtcctctggtctcttgccaagtttcccagccactcgagggagaaatatcgggaggtttgacttcctccggggctttcccgagggcttcaccgtgagccctgcggccctcagggctgcaatcctggattcaatgtctgaaacctcgctctctgcctgctggacttctgaggccgtcactgccactctgtcctccagctctgacagctcctcatctgtggtcctgttgt

SEQ ID NO: 362 - DNA, 463 bp, Homo sapien
acttcatcaggccataatgggtgcctcccgtgagaatccaagcacctttggactgcgcgatgtagatgagccggctgaagatcttgcgcatgcgcggcttcagggcgaagttcttggcgcccccggtcacagaaatgaccaggttgggtgttttcaggtgccagtgctgggtcagcagctcgtaaaggatttccgcgtccgtgtcgcaggacagacgtatatacttccctttcttccccagtgtctcaaactgaatatccccaaaggcgtcggtaggaaattccttggtgtgtttcttgtagttccatttctcactttggttgatctgggtgccttccatgtgctggctctgggcatagccacacttgcacacattctccctgataagcacgatggtgtggacaggaaggaaggatttcattgagcctgcttatggaaactggtattgttagcttaaatagac

SEQ ID NO: 363 - DNA, 653 bp, Homo sapien
  misc_feature (1)...(653): n = A,T,C or G
acccccgagtncctgnctggcatactgngaacgaccaacgacacacccaagctcggcctcctcttggngattctgggtgacatcttcatgaatggcaaccgtgccagwgaggctgtcctctgggaggcactacgcaagatgggactgcgtcctggggtgagacatcctctccttggagatctaacgaaacttctcacctatgagttgtaaagcagaaatacctgnactacagacgagtgcccaacagcaaccccccggaagtatgagttcctctrgggcctccgttcctaccatgagasctagcaagatgnaagtgttgagantcattgcagaggttcagaaaagagacccntcgtgactggtctgcacagttcatggaggctgcagatgaggccttggatgctctggatgctgctgcagctgaggccgaagcccgggctgaagcaagaacccgcatgggaattggagatgaggctgtgtntgggccctggagctgggatgacattgagtttgagctgctgacctgggatgaggaaggagattttggagatccntggtccagaattccatttaccttctgggccagataccaccagaatgcccgctccagattccctcagacctttgccggtcccattattggtcstggtggt

SEQ ID NO: 364 - DNA, 401 bp, Homo sapien
actagaggaaagacgttaaaccactctactaccacttgtggaactctcaaagggtaaatgacaaagccaatgaatgactctaaaaacaatatttacatttaatggtttgtagacaataaaaaaacaaggtggatagatctagaattgtaacattttaagaaaaccatagcatttgacagatgagaaagctcaattatagatgcaaagttataactaaactactatagtagtaaagaaatacatttcacacccttcatataaattcactatcttggcttgaggcactccataaaatgtatcacgtgcatagtaaatctttatatttgctatggcgttgcactagaggacttggactgcaacaagtggatgcgcggaaaatgaaatcttcttcaatagcccag

SEQ ID NO: 365 - DNA, 356 bp, Homo sapien
ccagtgtcatatttgggcttaaaatttcaagaagggcacttcaaatggctttgcatttgcatgtttcagtgctagagcgtaggaatagaccctggcgtccactgtgagatgttcttcagctaccagagcatcaagtctctgcagcaggtcattcttgggtaaagaaatgacttccacaaactctccatcccctggctttggcttcggccttgcgttttcggcatcatctccgttaatggtgactgtcacgatgtgtatagtacagtttgacaagcctgggtccatacagaccgctggagaacattcggcaatgtcccctttgtagccagtttcttcttcgagctcccggagagcag

SEQ ID NO: 366 - DNA, 1851 bp, Homo sapien
tcatcaccattgccagcagcggcaccgttagtcaggttttctgggaatcccacatgagtacttccgtgttcttcattcttcttcaatagccataaatcttctagctctggctggctgttttcacttcctttaagcctttgtgactcttcctctgatgtcagctttaagtcttgttctggattgctgttttcagaagagatttttaacatctgtttttctttgtagtcagaaagtaactggcaaattacatgatgatgactagaaacagcatactctctggccgtctttccagatcttgagaagatacatcaacattttgctcaagtagagggctgactatacttgctgatccacaacatacagcaagtatgagagcagttcttccatatctatccagcgcatttaaattcgcttttttcttgattaaaaatttcaccacttgctgtttttgctcatgtataccaagtagcagtggtgtgaggccatgcttgttttttgattcgatatcagcaccgtataagagcagtgctttggccattaatttatcttcattgtagacagcatagtgtagagtggtatttccatactcatctggaatatttggatcagtgccatgttccagcaacattaacgcacattcatcttcctggcattgtacggcctttgtcagagctgtcctctttttgttgtcaaggacattaagttgacatcgtctgtccagcacgagttttactacttctgaattcccattggcagaggccagatgtagagcagtcctcttttgcttgtccctcttgttcacatccgtgtccctgagcatgacgatgagatcctttctggggactttaccccaccaggcagctctgtggagcttgtccagatcttctccatggacgtggtacctgggatccatgaaggcgctgtcatcgtagtctccccaagcgaccacgttgctcttgccgctcccctgcagcaggggaagcagtggcagcaccacttgcacctcttgctcccaagcgtcttcacagaggagtcgttgtggtctccagaagtgcccacgttgctcttgccgctccccctgtccatccagggaggaagaaatgcaggaaatgaaagatgcatgcacgatggtatactcctcagccatcaaacttctggacagcaggtcacttccagcaaggtggagaaagctgtccacccacagaggatgagatccagaaaccacaatatccattcacaaacaaacacttttcagccagacacaggtactgaaatcatgtcatctgcggcaacatggtggaacctacccaatcacacatcaagagatgaagacactgcagtatatctgcacaacgtaatactcttcatccataacaaaataatataattttcctctggagccatatggatgaactatgaaggaagaactccccgaagaagccagtcgcagagaagccacactgaagctctgtcctcagccatcagcgccacggacaggartgtgtttcttccccagtgatgcagcctcaagttatcccgaagctgccgcagcacacggtggctcctgagaaacaccccagctcttccggtctaacacaggcaagtcaataaatgtgataatcacataaacagaattaaaagcaaagtcacataagcatctcaacagacacagaaaaggcatttgacaaaatccagcatccttgtatttattgttgcagttctcagaggaaatgcttctaacttttccccatttagtattatgttggctgtgggcttgtcataggtggtttttattactttaaggtatgtcccttctatgcctgttttgctgagggttttaattctcgtgcc

SEQ ID NO: 367 - DNA, 668 bp, Homo sapien
cttgagcttccaaatayggaagactggcccttacacasgtcaatgttaaaatgaatgcatttcagtattttgaagataaaattrgtagatctataccttgttttttgattcgatatcagcaccrtataagagcagtgctttggccattaatttatctttcattrtagacagcrtagtgyagagtggtatttccatactcatctggaatatttggatcagtgccatgttccagcaacattaacgcacattcatcttcctggcattgtacggcctgtcagtattagacccaaaaacaaattacatatcttaggaattcaaaataacattccacagctttcaccaactagttatatttaaaggagaaaactcatttttatgccatgtattgaaatcaaacccacctcatgctgatatagttggctactgcatacctttatcagagctgtcctctttttgttgtcaaggacattaagttgacatcgtctgtccagcaggagttttactacttctgaattcccattggcagaggccagatgtagagcagtcctatgagagtgagaagactttttaggaaattgtagtgcactagctacagccatagcaatgattcatgtaactgcaaacactgaatagcctgctattactctgccttcaaaaaaaaaaaaaaa

SEQ ID NO: 368 - DNA, 1512 bp, Homo sapien
gggtcgcccagggggsgcgtgggctttcctcgggtgggtgtgggttttccctgggtggggtgggctgggctrgaatcccctgctggggttggcaggttttggctgggattgacttttytcttcaaacagattggaaacccggagttacctgctagttggtgaaactggttggtagacgcgatctgttggctactactggcttctcctggctgttaaaagcagatggtggttgaggttgattccatgccggctgcttcttctgtgaagaagccatttggtctcaggagcaagatgggcaagtggtgctgccgttgcttcccctgctgcagggagagcggcaagagcaacgtgggcacttctggagaccacgacgactctgctatgaagacactcaggagcaagatgggcaagtggtgccgccactgcttcccctgctgcagggggagtggcaagagcaacgtgggcgcttctggagaccacgacgaytctgctatgaagacactcaggaacaagatgggcaagtggtgctgccactgcttcccctgctgcagggggagcrgcaagagcaaggtgggcgcttggggagactacgatgacagtgccttcatggagcccaggtaccacgtccgtggagaagatctggacaagctccacagagctgcctggtggggtaaagtccccagaaaggatctcatcgtcatgctcagggacactgacgtgaacaagaaggacaagcaaaagaggactgctctacatctggcctctgccaatgggaattcagaagtagtaaaactcstgctggacagacgatgtcaacttaatgtccttgacaacaaaaagaggacagctctgayaaaggccgtacaatgccaggaagatgaatgtgcgttaatgttgctggaacatggcactgatccaaatattccagatgagtatggaaataccactctrcactaygctrtctayaatgaagataaattaatggccaaagcactgctcttatayggtgctgatatcgaatcaaaaaacaaggtatagatctactaattttatcttcaaaatactgaaatgcattcattttaacattgacgtgtgtaagggccagtcttccgtatttggaagctcaagcataacttgaatgaaaatattttgaaatgacctaattatctmagactttattttaaatattgttattttcaaagaagcattagagggtacagttttttttttttaaatgcacttctggtaaatacttttgttgaaaacactgaatttgtaaaaggtaatacttactatttttcaatttttccctcctaggatttttttcccctaatgaatgtaagatggcaaaatttgccctgaaataggttttacatgaaaactccaagaaaagttaaacatgtttcagtgaatagagatcctgctcctttggcaagttcctaaaaaacagtaatagatacgaggtgatgcgcctgtcagtggcaaggtttaagatatttctgatctcgtgcc

SEQ ID NO: 369 - DNA, 1853 bp, Homo sapien
gggtcgcccagggggsgcgtgggctttcctcgggtgggtgtgggttttccctgggtggggtgggctgggctrgaatcccctgctggggttggcaggttttggctgggattgacttttytcttcaaacagattggaaacccggagttacctgctagttggtgaaactggttggtagacgcgatctgttggctactactggcttctcctggctgttaaaagcagatggtggttgaggttgattccatgccggctgcttcttctgtgaagaagccatttggtctcaggagcaagatgggcaagtggtgctgccgttgcttcccctgctgcagggagagcggcaagagcaacgtgggcacttctggagaccacgacgactctgctatgaagacactcaggagcaagatgggcaagtggtgccgccactgcttcccctgctgcagggggagtggcaagagcaacgtgggcgcttctggagaccacgacgaytctgctatgaagacactcaggaacaagatgggcaagtggtgctgccactgcttcccctgctgcagggggagcrgcaagagcaaggtgggcgcttggggagactacgatgacagygccttcatggakcccaggtaccacgtccrtggagaagatctggacaagctccacagagctgcctggtggggtaaagtccccagaaaggatctcatcgtcatgctcagggacackgaygtgaacaagarggacaagcaaaagaggactgctctacatctggcctctgccaatgggaattcagaagtagtaaaactcstgctggacagacgatgtcaacttaatgtccttgacaacaaaaagaggacagctctgayaaaggccgtacaatgccaggaagatgaatgtgcgttaatgttgctggaacatggcactgatccaaatattccagatgagtatggaaataccactctrcactaygctrtctayaatgaagataaattaatggccaaagcactgctcttatayggtgctgatatcgaatcaaaaaacaagcatggcctcacaccactgytacttggtrtacatgagcaaaaacagcaagtsgtgaaatttttaatyaagaaaaaagcgaatttaaaatgcrctggatagatatggaagractgctctcatacttgctgtatgttgtggatcagcaagtatagtcagccytctacttgagcaaaatrttgatgtatcttctcaagatctggaaagacggccagagagtatgctgtttctagtcatcatcatgtaatttgccagttactttctgactacaaagaaaaacagatgttaaaaatctcttctgaaaacagcaatccagaacaagacttaaagctgacatcagaggaagagtcacaaaggcttaaaggaagtgaaaacagccagccagaggcatggaaacttttaaatttaaacttttggtttaatgttttttttttttgccttaataatattagatagtcccaaatgaaatwacctatgagactaggctttgagaatcaatagattctttttttaagaatcttttggctaggagcggtgtctcacgcctgtaattccagcaccttgagaggctgaggtgggcagatcacgagatcaggagatcgagaccatcctggctaacacggtgaaaccccatctctactaaaaatacaaaaacttagctgggtgtggtggcgggtgcctgtagtcccagctactcaggargctgaggcaggagaatggcatgaacccgggaggtggaggttgcagtgagccgagatccgccactacactccagcctgggtgacagagcaagactctgtctcaaaaaaaaaaaaaaaaaaaaa

SEQ ID NO: 370 - DNA, 2184 bp, Homo sapien
ggcacgagaattaaaaccctcagcaaaacaggcatagaagggacataccttaaagtaataaaaaccacctatgacaagcccacagccaacataatactaaatggggaaaagttagaagcatttcctctgagaactgcaacaataaatacaaggatgctggattttgtcaaatgccttttctgtgtctgttgagatgcttatgtgactttgcttttaattctgtttatgtgattatcacatttattgacttgcctgtgttagaccggaagagctggggtgtttctcaggagccaccgtgtgctgcggcagcttcgggataacttgaggctgcatcactggggaagaaacacaytcctgtccgtggcgctgatggctgaggacagagcttcagtgtggcttctctgcgactggcttcttcggggagttcttccttcatagttcatccatatggctccagaggaaaattatattattttgttatggatgaagagtattacgttgtgcagatatactgcagtgtcttcatctcttgatgtgtgattgggtaggttccaccatgttgccgcagatgacatgatttcagtacctgtgtctggctgaaaagtgtttgtttgtgaatggatattgtggtttctggatctcatcctctgtgggtggacagctttctccaccttgctggaagtgacctgctgtccagaagtttgatggctgaggagtataccatcgtgcatgcatctttcatttcctgcatttcttcctccctggatggacagggggagcggcaagagcaacgtgggcacttctggagaccacaacgactcctctgtgaagacgcttgggagcaagaggtgcaagtggtgctgccactgcttcccctgctgcaggggagcggcaagagcaacgtggtcgcttggggagactacgatgacagcgccttcatggatcccaggtaccacgtccatggagaagatctggacaagctccacagagctgcctggtggggtaaagtccccagaaaggatctcatcgtcatgctcagggacacggatgtgaacaagagggacaagcaaaagaggactgctctacatctggcctctgccaatgggaattcagaagtagtaaaactcgtgctggacagacgatgtcaacttaatgtccttgacaacaaaaagaggacagctctgacaaaggccgtacaatgccaggaagatgaatgtgcgttaatgttgctggaacatggcactgatccaaatattccagatgagtatggaaataccactctacactatgctgtctacaatgaagataaattaatggccaaagcactgctcttatacggtgctgatatcgaatcaaaaaacaagcatggcctcacaccactgctacttggtatacatgagcaaaaacagcaagtggtgaaatttttaatcaagaaaaaagcgaatttaaatgcgctggatagatatggaagaactgctctcatacttgctgtatgttgtggatcagcaagtatagtcagccctctacttgagcaaaatgttgatgtatcttctcaagatctggaaagacggccagagagtatgctgtttctagtcatcatcatgtaatttgccagttactttctgactacaaagaaaaacagatgttaaaaatctcttctgaaaacagcaatccagaacaagacttaaagctgacatcagaggaagagtcacaaaggcttaaaggaagtgaaaacagccagccagaggcatggaaacttttaaatttaaacttttggtttaatgttttttttttttgccttaataatattagatagtcccaaatgaaatwacctatgagactaggctttgagaatcaatagattctttttttaagaatcttttggctaggagcggtgtctcacgcctgtaattccagcaccttgagaggctgaggtgggcagatcacgagatcaggagatcgagaccatcctggctaacacggtgaaaccccatctctactaaaaatacaaaaacttagctgggtgtggtggcgggtgcctgtagtcccagctactcaggargctgaggcaggagaatggcatgaacccgggaggtggaggttgcagtgagccgagatccgccactacactccagcctgggtgacagagcaagactctgtctcaaaaaaaaaaaaaaaaaaaaa

SEQ ID NO: 371 - DNA, 1855 bp, Homo sapien
  misc_feature (1)...(1855): n = A,T,C or G
tgcacgcatcggccagtgtctgtgccacgtacactgacgccccctgagatgtgcacgccgcacgcgcacgttgcacgcgcggcagcggcttggctggcttgtaacggcttgcacgcgcacgccgcccccgcataaccgtcagactggcctgtaacggcttgcaggcgcacgccgcacgcgcgtaacggcttggctgccctgtaacggcttgcacgtgcatgctgcacgcgcgttaacggcttggctggcatgtagccgcttggcttggctttgcattytttgctkggctkggcgttgktytcttggattgacgcttcctccttggatkgacgtttcctccttggatkgacgtttcytytytcgcgttcctttgctggacttgaccttttytctgctgggtttggcattcctttggggtgggctgggtgttttctccgggggggktkgcccttcctggggtgggcgtgggkcgcccccagggggcgtgggctttccccgggtgggtgtgggttttcctggggtggggtgggctgtgctgggatccccctgctggggttggcagggattgacttttttcttcaaacagattggaaacccggagtaacntgctagttggtgaaactggttggtagacgcgatctgctggtactactgtttctcctggctgttaaaagcagatggtggctgaggttgattcaatgccggctgcttcttctgtgaagaagccatttggtctcaggagcaagatgggcaagtggtgcgccactgcttcccctgctgcagggggagcggcaagagcaacgtgggcacttctggagaccacaacgactcctctgtgaagacgcttgggagcaagaggtgcaagtggtgctgcccactgcttcccctgctgcaggggagcggcaagagcaacgtggkcgcttggggagactacgatgacagcgccttcatggakcccaggtaccacgtccrtggagaagatctggacaagctccacagagctgcctggtggggtaaagtccccagaaaggatctcatcgtcatgctcagggacactgaygtgaacaagarggacaagcaaaagaggactgctctacatctggcctctgccaatgggaattcagaagtagtaaaactcgtgctggacagacgatgtcaacttaatgtccttgacaacaaaaagaggacagctctgacaaaggccgtacaatgccaggaagatgaatgtgcgttaatgttgctggaacatggcactgatccaaatattccagatgagtatggaaataccactctacactatgctgtctacaatgaagataaattaatggccaaagcactgctcttatacggtgctgatatcgaatcaaaaaacaaggtatagatctactaattttatcttcaaaatactgaaatgcattcattttaacattgacgtgtgtaagggccagtcttccgtatttggaagctcaagcataacttgaatgaaaatattttgaaatgacctaattatctaagactttattttaaatattgttattttcaaagaagcattagagggtacagttttttttttttaaatgcacttctggtaaatacttttgttgaaaacactgaatttgtaaaaggtaatacttactatttttcaatttttccctcctaggatttttttcccctaatgaatgtaagatggcaaaatttgccctgaaataggttttacatgaaaactccaagaaaagttaaacatgtttcagtgaatagagatcctgctcctttggcaagttcctaaaaaacagtaatagatacgaggtgatgcgcctgtcagtggcaaggtttaagatatttctgatctcgtgcc

SEQ ID NO: 372 - DNA, 1059 bp, Homo sapien
gcaacgtgggcacttctggagaccacaacgactcctctgtgaagacgcttgggagcaagaggtgcaagtggtgctgcccactgcttcccctgctgcaggggagcggcaagagcaacgtgggcgcttgrggagactmcgatgacagygccttcatggagcccaggtaccacgtccgtggagaagatctggacaagctccacagagctgccctggtggggtaaagtccccagaaaggatctcatcgtcatgctcagggacactgaygtgaacaagarggacaagcaaaagaggactgctctacatctggcctctgccaatgggaattcagaagtagtaaaactcstgctggacagacgatgtcaacttaatgtccttgacaacaaaaagaggacagctctgayaaaggccgtacaatgccaggaagatgaatgtgcgttaatgttgctggaacatggcactgatccaaatattccagatgagtatggaaataccactctrcactaygctrtctayaatgaagataaattaatggccaaagcactgctcttatayggtgctgatatcgaatcaaaaaacaaggtatagatctactaattttatcttcaaaatactgaaatgcattcattttaacattgacgtgtgtaagggccagtcttccgtatttggaagctcaagcataacttgaatgaaaatattttgaaatgacctaattatctaagactttattttaaatattgttattttcaaagaagcattagagggtacagttttttttttttaaatgcacttctggtaaatacttttgttgaaaacactgaatttgtaaaaggtaatacttactatttttcaatttttccctcctaggatttttttcccctaatgaatgtaagatggcaaaatttgccctgaaataggttttacatgaaaactccaagaaaagttaaacatgtttcagtgaatagagatcctgctcctttggcaagttcctaaaaaacagtaatagatacgaggtgatgcgcctgtcagtggcaaggtttaagatatttctgatctcgtgcc

SEQ ID NO: 373 - DNA, 1155 bp, Homo sapien
atggtggttgaggttgattccatgccggctgcctcttctgtgaagaagccatttggtctcaggagcaagatgggcaagtggtgctgccgttgcttcccctgctgcagggagagcggcaagagcaacgtgggcacttctggagaccacgacgactctgctatgaagacactcaggagcaagatgggcaagtggtgccgccactgcttcccctgctgcagggggagtggcaagagcaacgtgggcgcttctggagaccacgacgactctgctatgaagacactcaggaacaagatgggcaagtggtgctgccactgcttcccctgctgcagggggagcggcaagagcaaggtgggcgcttggggagactacgatgacagtgccttcatggagcccaggtaccacgtccgtggagaagatctggacaagctccacagagctgcctggtggggtaaagtccccagaaaggatctcatcgtcatgctcagggacactgacgtgaacaagaaggacaagcaaaagaggactgctctacatctggcctctgccaatgggaattcagaagtagtaaaactcctgctggacagacgatgtcaacttaatgtccttgacaacaaaaagaggacagctctgataaaggccgtacaatgccaggaagatgaatgtgcgttaatgttgctggaacatggcactgatccaaatattccagatgagtatggaaataccactctgcactacgctatctataatgaagataaattaatggccaaagcactgctcttatatggtgctgatatcgaatcaaaaaacaagcatggcctcacaccactgttacttggtgtacatgagcaaaaacagcaagtcgtgaaatttttaatcaagaaaaaagcgaatttaaatgcactggatagatatggaaggactgctctcatacttgctgtatgttgtggatcagcaagtatagtcagccttctacttgagcaaaatattgatgtatcttctcaagatctatctggacagacggccagagagtatgctgtttctagtcatcatcatgtaatttgccagttactttctgactacaaagaaaaacagatgctaaaaatctcttctgaaaacagcaatccagaaaatgtctcaagaaccagaaataaataa

SEQ ID NO: 374 - DNA, 2000 bp, Homo sapien
atggtggttgaggttgattccatgccggctgcctcttctgtgaagaagccatttggtctcaggagcaagatgggcaagtggtgctgccgttgcttcccctgctgcagggagagcggcaagagcaacgtgggcacttctggagaccacgacgactctgctatgaagacactcaggagcaagatgggcaagtggtgccgccactgcttcccctgctgcagggggagtggcaagagcaacgtgggcgcttctggagaccacgacgactctgctatgaagacactcaggaacaagatgggcaagtggtgctgccactgcttcccctgctgcagggggagcggcaagagcaaggtgggcgcttggggagactacgatgacagtgccttcatggagcccaggtaccacgtccgtggagaagatctggacaagctccacagagctgcctggtggggtaaagtccccagaaaggatctcatcgtcatgctcagggacactgacgtgaacaagaaggacaagcaaaagaggactgctctacatctggcctctgccaatgggaattcagaagtagtaaaactcctgctggacagacgatgtcaacttaatgtccttgacaacaaaaagaggacagctctgataaaggccgtacaatgccaggaagatgaatgtgcgttaatgttgctggaacatggcactgatccaaatattccagatgagtatggaaataccactctgcactacgctatctataatgaagataaattaatggccaaagcactgctcttatatggtgctgatatcgaatcaaaaaacaagcatggcctcacaccactgttacttggtgtacatgagcaaaaacagcaagtcgtgaaatttttaatcaagaaaaaagcgaatttaaatgcactggatagatatggaaggactgctctcatacttgctgtatgttgtggatcagcaagtatagtcagccttctacttgagcaaaatattgatgtatcttctcaagatctatctggacagacggccagagagtatgctgtttctagtcatcatcatgtaatttgccagttactttctgactacaaagaaaaacagatgctaaaaatctcttctgaaaacagcaatccagaacaagacttaaagctgacatcagaggaagagtcacaaaggttcaaaggcagtgaaaatagccagccagagaaaatgtctcaagaaccagaaataaataaggatggtgatagagaggttgaagaagaaatgaagaagcatgaaagtaataatgtgggattactagaaaacctgactaatggtgtcactgctggcaatggtgataatggattaattcctcaaaggaagagcagaacacctgaaaatcagcaatttcctgacaacgaaagtgaagagtatcacagaatttgcgaattagtttctgactacaaagaaaaacagatgccaaaatactcttctgaaaacagcaacccagaacaagacttaaagctgacatcagaggaagagtcacaaaggcttgagggcagtgaaaatggccagccagagctagaaaattttatggctatcgaagaaatgaagaagcacggaagtactcatgtcggattcccagaaaacctgactaatggtgccactgctggcaatggtgatgatggattaattcctccaaggaagagcagaacacctgaaagccagcaatttcctgacactgagaatgaagagtatcacagtgacgaacaaaatgatactcagaagcaattttgtgaagaacagaacactggaatattacacgatgagattctgattcatgaagaaaagcagatagaagtggttgaaaaaatgaattctgagctttctcttagttgtaagaaagaaaaagacatcttgcatgaaaatagtacgttgcgggaagaaattgccatgctaagactggagctagacacaatgaaacatcagagccagctaaaaaaaaaaaaaaaaaaaaaaaaaaaaaaaaa

SEQ ID NO: 375 - DNA, 2040 bp, Homo sapien
atggtggttgaggttgattccatgccggctgcctcttctgtgaagaagccatttggtctcaggagcaagatgggcaagtggtgctgccgttgcttcccctgctgcagggagagcggcaagagcaacgtgggcacttctggagaccacgacgactctgctatgaagacactcaggagcaagatgggcaagtggtgccgccactgcttcccctgctgcagggggagtggcaagagcaacgtgggcgcttctggagaccacgacgactctgctatgaagacactcaggaacaagatgggcaagtggtgctgccactgcttcccctgctgcagggggagcggcaagagcaaggtgggcgcttggggagactacgatgacagtgccttcatggagcccaggtaccacgtccgtggagaagatctggacaagctccacagagctgcctggtggggtaaagtccccagaaaggatctcatcgtcatgctcagggacactgacgtgaacaagaaggacaagcaaaagaggactgctctacatctggcctctgccaatgggaattcagaagtagtaaaactcctgctggacagacgatgtcaacttaatgtccttgacaacaaaaagaggacagctctgataaaggccgtacaatgccaggaagatgaatgtgcgttaatgttgctggaacatggcactgatccaaatattccagatgagtatggaaataccactctgcactacgctatctataatgaagataaattaatggccaaagcactgctcttatatggtgctgatatcgaatcaaaaaacaagcatggcctcacaccactgttacttggtgtacatgagcaaaaacagcaagtcgtgaaatttttaatcaagaaaaaagcgaatttaaatgcactggatagatatggaaggactgctctcatacttgctgtatgttgtggatcagcaagtatagtcagccttctacttgagcaaaatattgatgtatcttctcaagatctatctggacagacggccagagagtatgctgtttctagtcatcatcatgtaatttgccagttactttctgactacaaagaaaaacagatgctaaaaatctcttctgaaaacagcaatccagaacaagacttaaagctgacatcagaggaagagtcacaaaggttcaaaggcagtgaaaatagccagccagagaaaatgtctcaagaaccagaaataaataaggatggtgatagagaggttgaagaagaaatgaagaagcatgaaagtaataatgtgggattactagaaaacctgactaatggtgtcactgctggcaatggtgataatggattaattcctcaaaggaagagcagaacacctgaaaatcagcaatttcctgacaacgaaagtgaagagtatcacagaatttgcgaattagtttctgactacaaagaaaaacagatgccaaaatactcttctgaaaacagcaacccagaacaagacttaaagctgacatcagaggaagagtcacaaaggcttgagggcagtgaaaatggccagccagagaaaagatctcaagaaccagaaataaataaggatggtgatagagagctagaaaattttatggctatcgaagaaatgaagaagcacggaagtactcatgtcggattcccagaaaacctgactaatggtgccactgctggcaatggtgatgatggattaattcctccaaggaagagcagaacacctgaaagccagcaatttcctgacactgagaatgaagagtatcacagtgacgaacaaaatgatactcagaagcaattttgtgaagaacagaacactggaatattacacgatgagattctgattcatgaagaaaagcagatagaagtggttgaaaaaatgaattctgagctttctcttagttgtaagaaagaaaaagacatcttgcatgaaaatagtacgttgcgggaagaaattgccatgctaagactggagctagacacaatgaaacatcagagccagctaaaaaaaaaaaaaaaaaaaaaaaaaaaa

SEQ ID NO: 376 - protein, 329 aa, Homo sapien
MDIVVSGSHPLWVDSFLHLAGSDLLSRSLMAEEYTIVHASFISCISSSLDGQGERQEQRGHFWRPQRLLCEDAWEQEVQVVLPLLPLLQGSGKSNVVAWGDYDDSAFMDPRYHVHGEDLDKLHRAAWWGKVPRKDLIVMLRDTDVNKRDKQKRTALHLASANGNSEVVKLVLDRRCQLNVLDNKKRTALTKAVQCQEDECALMLLEHGTDPNIPDEYGNTTLHYAVYNEDKLMAKALLLYGADIESKNKHGLTPLLLGIHEQKQQVVKFLIKKKANLNALDRYGRTALILAVCCGSASIVSPLLEQNVDVSSQDLERRPESMLFLVIIM

SEQ ID NO: 377 - protein, 148 aa, Homo sapien
  VARIANT (1)...(148): Xaa = Any Amino Acid
MTXPSWSPGTTSVEKIWTSSTELPWWGKVPRKDLIVMLRDTDVNKXDKQKRTALHLASANGNSEVVKLXLDRRCQLNVLDNKKRTALXKAVQCQEDECALMLLEHGTDPNIPDEYGNTTLHYAXYNEDKLMAKALLLYGADIESKNKV

SEQ ID NO: 378 - protein, 1719 aa, Homo sapien [sequence omitted]

SEQ ID NO: 379 - protein, 656 aa, Homo sapien
MVVEVDSMPAASSVKKPFGLRSKMGKWCCRCFPCCRESGKSNVGTSGDHDDSAMKTLRSKMGKWCRHCFPCCRGSGKSNVGASGDHDDSAMKTLRNKMGKWCCHCFPCCRGSGKSKVGAWGDYDDSAFMEPRYHVRGEDLDKLHRAAWWGKVPRKDLIVMLRDTDVNKKDKQKRTALHLASANGNSEVVKLLLDRRCQLNVLDNKKRTALIKAVQCQEDECALMLLEHGTDPNIPDEYGNTTLHYAIYNEDKLMAKALLLYGADIESKNKHGLTPLLLGVHEQKQQVVKFLIKKKANLNALDRYGRTALILAVCCGSASIVSLLLEQNIDVSSQDLSGQTAREYAVSSHHHVICQLLSDYKEKQMLKISSENSNPEQDLKLTSEEESQRFKGSENSQPEKMSQEPEINKDGDREVEEEMKKHESNNVGLLENLTNGVTAGNGDNGLIPQRKSRTPENQQFPDNESEEYHRICELVSDYKEKQMPKYSSENSNPEQDLKLTSEEESQRLEGSENGQPELENFMAIEEMKKHGSTHVGFPENLTNGATAGNGDDGLIPPRKSRTPESQQFPDTENEEYHSDEQNDTQKQFCEEQNTGILHDEILIHEEKQIEVVEKMNSELSLSCKKEKDILHENSTLREEIAMLRLELDTMKHQSQL

SEQ ID NO: 380 - protein, 671 aa, Homo sapien
MVVEVDSMPAASSVKKPFGLRSKMGKWCCRCFPCCRESGKSNVGTSGDHDDSAMKTLRSKMGKWCRHCFPCCRGSGKSNVGASGDHDDSAMKTLRNKMGKWCCHCFPCCRGSGKSKVGAWGDYDDSAFMEPRYHVRGEDLDKLHRAAWWGKVPRKDLIVMLRDTDVNKKDKQKRTALHLASANGNSEVVKLLLDRRCQLNVLDNKKRTALIKAVQCQEDECALMLLEHGTDPNIPDEYGNTTLHYAIYNEDKLMAKALLLYGADIESKNKHGLTPLLLGVHEQKQQVVKFLIKKKANLNALDRYGRTALILAVCCGSASIVSLLLEQNIDVSSQDLSGQTAREYAVSSHHHVICQLLSDYKEKQMLKISSENSNPEQDLKLTSEEESQRFKGSENSQPEKMSQEPEINKDGDREVEEEMKKHESNNVGLLENLTNGVTAGNGDNGLIPQRKSRTPENQQFPDNESEEYHRICELVSDYKEKQMPKYSSENSNPEQDLKLTSEEESQRLEGSENGQPEKRSQEPEINKDGDRELENFMAIEEMKKHGSTHVGFPENLTNGATAGNGDDGLIPPRKSRTPESQQFPDTENEEYHSDEQNDTQKQFCEEQNTGILHDEILIHEEKQIEVVEKMNSELSLSCKKEKDILHENSTLREEIAMLRLELDTMKHQSQL

SEQ ID NO: 381 - DNA, 251 bp, Homo sapien
ggagaagcgtctgctggggcaggaaggggtttccctgccctctcacctgtccctcaccaaggtaacatgcttcccctaagggtatcccaacccaggggcctcaccatgacctctgaggggccaatatcccaggagaagcattggggagttgggggcaggtgaaggacccaggactcacacatcctgggcctccaaggcagaggagagggtcctcaagaaggtcaggaggaaaatccgtaacaagcagtcag

SEQ ID NO: 382 - DNA, 3279 bp, Homo sapiens
cttcctgcagcccccatgctggtgaggggcacgggcaggaacagtggacccaacatggaaatgctggagggtgtcaggaagtgatcgggctctggggcagggaggaggggtggggagtgtcactgggaggggacatcctgcagaaggtaggagtgagcaaacacccgctgcaggggaggggagagccctgcggcacctgggggagcagagggagcagcacctgcccaggcctgggaggaggggcctggagggcgtgaggaggagcgagggggctgcatggctggagtgagggatcaggggcagggcgcgagatggcctcacacagggaagagagggcccctcctgcagggcctcacctgggccacaggaggacactgcttttcctctgaggagtcaggagctgtggatggtgctggacagaagaaggacagggcctggctcaggtgtccagaggctgtcgctggcttccctttgggatcagactgcagggagggagggcggcagggttgtggggggagtgacgatgaggatgacctgggggtggctccaggccttgcccctgcctgggccctcacccagcctccctcacagtctcctggccctcagtctctcccctccactccatcctccatctggcctcagtgggtcattctgatcactgaactgaccatacccagccctgcccacggccctccatggctccccaatgccctggagaggggacatctagtcagagagtagtcctgaagaggtggcctctgcgatgtgcctgtgggggcagcatcctgcagatggtcccggccctcatcctgctgacctgtctgcagggactgtcctcctggaccttgccccttgtgcaggagctggaccctgaagtcccctccccataggccaagactggagccttgttccctctgttggactccctgcccatattcttgtgggagtgggttctggagacatttctgtctgttcctgagagctgggaattgctctcagtcatctgcctgcgcggttctgagagatggagttgcctaggcagttattggggccaatctttctcactgtgtctctcctcctttacccttagggtgattctgggggtccacttgtctgtaatggtgtgcttcaaggtatcacatcatggggccctgagccatgtgccctgcctgaaaagcctgctgtgtacaccaaggtggtgcattaccggaagtggatcaaggacaccatcgcagccaacccctgagtgcccctgtcccacccctacctctagtaaatttaagtccacctcacgttctggcatcacttggcctttctggatgctggacacctgaagcttggaactcacctggccgaagctcgagcctcctgagtcctactgacctgtgctttctggtgtggagtccagggctgctaggaaaaggaatgggcagacacaggtgtatgccaatgtttctgaaatgggtataatttcgtcctctccttcggaacactggctgtctctgaagacttctcgctcagtttcagtgaggacacacacaaagacgtgggtgaccatgttgtttgtggggtgcagagatgggaggggtggggcccaccctggaagagtggacagtgacacaaggtggacactctctacagatcactgaggataagctggagccacaatgcatgaggcacacacacagcaaggttgacgctgtaaacatagcccacgctgtcctgggggcactgggaagcctagataaggccgtgagcagaaagaaggggaggatcctcctatgttgttgaaggagggactagggggagaaactgaaagctgattaattacaggaggtttgttcaggtcccccaaaccaccgtcagatttgatgatttcctagcaggacttacagaaataaagagctatcatgctgtggtttattatggtttgttacattgataggatacatactgaaatcagcaaacaaaacagatgtatagattagagtgtggagaaaacagaggaaaacttgcagttacgaagactggcaacttggctttactaagttttcagactggcaggaagtcaaacctattaggctgaggaccttgtggagtgtagctgatccagctgatagaggaactagccaggtgggggcctttccctttggatggggggcatatccgacagttattctctccaagtggagacttacggacagcatataattctccctgcaaggatgtatgataatatgtacaaagtaattccaactgaggaagctcacctgatccttagtgtccagggtttttactgggggtctgtaggacgagtatggagtacttgaataattgacctgaagtcctcagacctgaggttccctagagttcaaacagatacagcatggtccagagtcccagatgtacaaaaacagggattcatcacaaatcccatctttagcatgaagggtctggcatggcccaaggccccaagtatatcaaggcacttgggcagaacatgccaaggaatcaaatgtcatctcccaggagttattcaagggtgagccctttacttgggatgtacaggctttgagcagtgcagggctgctgagtcaaccttttattgtacaggggatgagggaaagggagaggatgaggaagcccccctggggatttggtttggtcttgtgatcaggtggtctatggggctatccctacaaagaagaatccagaaataggggcacattgaggaatgatactgagcccaaagagcattcaatcattgttttatttgccttcttttcacaccattggtgagggagggattaccaccctggggttatgaagatggttgaacaccccacacatagcaccggagatatgagatcaacagtttcttagccatagagattcacagcccagagcaggaggacgctgcacaccatgcaggatgacatgggggatgcgctcgggattggtgtgaagaagcaaggactgttagaggcaggctttatagtaacaagacggtggggcaaactctgatttccgtgggggaatgtcatggtcttgctttactaagttttgagactggcaggtagtgaaactcattaggctgagaaccttgtggaatgcagctgacccagctgatagaggaagtagccaggtgggagcctttcccagtgggtgtgggacatatctggcaagattttgtggcactcctggttacagatactggggcagcaaataaaactgaatcttgttttcagaccttaaaaaaaaaaaaaaaaaaaaagtttt

SEQ ID NO: 383 - protein, 154 aa, Homo sapiens [sequence omitted]

SEQ ID NO: 384 - DNA, 557 bp, Homo sapiens
ggatcctctagagcggccgcctactactactaaattcgcggccgcgtcgacgaagaagagaaagatgtgttttgttttggactctctgtggtcccttccaatgctgtgggtttccaaccaggggaagggtcccttttgcattgccaagtgccataaccatgagcactactctaccatggttctgcctcctggccaagcaggctggtttgcaagaatgaaatgaatgattctacagctaggacttaaccttgaaatggaaagtcttgcaatcccatttgcaggatccgtctgtgcacatgcctctgtagagagcagcattcccagggaccttggaaacagttggcactgtaaggtgcttgctccccaagacacatcctaaaaggtgttgtaatggtgaaaacgtcttccttctttattgccccttcttatttatgtgaacaactgtttgtctttttttgtatcttttttaaactgtaaagttcaattgtgaaaatgaatatcatgcaaataaattatgcgatttttttttcaaagtaaaaaaaaaaaaaaaaaaaaaa

SEQ ID NO: 385 - DNA, 337 bp, Homo sapiens
ttcccaggtgatgtgcgagggaagacacatttactatccttgatggggctgattcctttagtttctctagcagcagatgggttaggaggaagtgacccaagtggttgactcctatgtgcatctcaaagccatctgctgtcttcgagtacggacacatcatcactcctgcattgttgatcaaaacgtggaggtgcttttcctcagctaagaagcccttagcaaaagctcgaatagacttagtatcagacaggtccagtttccgcaccaacacctgctggttccctgtcgtggtctggatctctttggccaccaattcccccttttccacatcccggca

SEQ ID NO: 386 - DNA, 300 bp, Homo sapiens
gggcccgctaccggcccaggccccgcctcgcgagtcctcctccccgggtgcctgcccgcagcccgctcggcccagagggtgggcgcggggctgcctctaccggctggcggctgtaactcagcgaccttggcccgaaggctctagcaaggacccaccgaccccagccgcggcggcggcggcgcggactttgcccggtgtgtggggcggagcggactgcgtgtccgcggacgggcagcgaagatgttagccttcgctgccaggaccgtggaccgatcccagggctgtggtgtaacctcagcc

SEQ ID NO: 387 - DNA, 537 bp, Homo sapiens
gggccgagtcgggcaccaagggactctttgcaggcttccttcctcggatcatcaaggctgccccctcctgtgccatcatgatcagcacctatgagttcggcaaaagcttcttccagaggctgaaccaggaccggcttctgggcggctgaaaggggcaaggaggcaaggaccccgtctctcccacggatggggagagggcaggaggagacccagccaagtgccttttcctcagcactgagggagggggcttgtttcccttccctcccggcgacaagctccagggcagggctgtccctctgggcggcccagcacttcctcagacacaacttcttcctgctgctccagtcgtggggatcatcacttacccaccccccaagttcaagaccaaatcttccagctgcccccttcgtgtttccctgtgtttgctgtagctgggcatgtctccaggaaccaagaagccctcagcctggtgtagtctccctgacccttgttaattccttaagtctaaagatgatgaacttcaaaaaaaaaaaaaaa

SEQ ID NO: 388 - DNA, 520 bp, Homo sapiens
aggataatttttaaaccaatcaaatgaaaaaaacaaacaaacaaaaaaggaaatgtcatgtgaggttaaaccagtttgcattcccctaatgtggaaaaagtaagaggactactcagcactgtttgaagattgcctcttctacagcttctgagaattgtgttatttcacttgccaagtgaaggaccccctccccaacatgccccagcccacccctaagcatggtcccttgtcaccaggcaaccaggaaactgctacttgtggacctcaccagagaccaggagggtttggttagctcacaggacttcccccaccccagaagattagcatcccatactagactcatactcaactcaactaggctcatactcaattgatggttattagacaattccatttctttctggttattataaacagaaaatctttcctcttctcattaccagtaaaggctcttggtatctttctgttggaatgatttctatgaacttgtcttattttaatggtgggttttttttctggt

SEQ ID NO: 389 - DNA, 365 bp, Homo sapiens
cgttgccccagtttgacagaaggaaaggcggagcttattcaaagtctagagggagtggaggagttaaggctggatttcagatctgcctggttccagccgcagtgtgccctctgctcccccaacgactttccaaataatctcaccagcgccttccagctcaggcgtcctagaagcgtcttgaagcctatggccagctgtctttgtgttccctctcacccgcctgtcctcacagctgagactcccaggaaaccttcagactaccttcctctgccttcagcaaggggcgttgcccacattctctgagggtcagtggaagaacctagactcccattgctagaggtagaaaggggaagggtgctggggag

SEQ ID NO: 390 - DNA, 221 bp, Homo sapiens
  misc_feature (1)...(221): n = A,T,C or G
tgcctctccatcctggccccgacttctctgtcaggaaagtggggatggaccccatctgcatacacggnttctcatgggtgtggaacatctctgcttgcggtttcaggaaggcctctggctgctctangagtctgancngantcgttgccccantntgacanaaggaaaggcggagcttattcaaagtctagagggagtggaggagttaaggctggatttca

SEQ ID NO: 391 - DNA, 325 bp, Homo sapiens
  misc_feature (1)...(325): n = A,T,C or G
tggagcaggtcccgaggcctccctagagcctggggccgactctgtgncgatgcangctttctctcgcgcccagcctggagctgctcctggcatctaccaacaatcagncgaggcgagcagtagccagggcactgctgccaacagccagtccnnataccatcatgtnacccggtgngctctnaanttngatntccanagccctacccatcntagttctgctctcccaccggntaccagccccactgcccaggaatcctacagccagtaccctgtcccgacgtctctacctaccagtacgatgagacctccggctactactatgacc

SEQ ID NO: 392 - DNA, 277 bp, Homo sapiens
  misc_feature (1)...(277): n = A,T,C or G
atattgtttaactccttcctttatatcttttaacattttcatggngaaaggttcacatctagtctcacttnggcnagngnctcctacttgagtctcttccccggcctgnnccagtngnaaantaccangaaccgncatgncttaanaacnncctggtttntgggttnntcaatgactgcatgcagtgcaccaccctgtccactacgtgatgctgtaggattaaagtctcacagtgggcggctgaggatacagcgccgcgtcctgtgttgctggggaa

SEQ ID NO: 393 - DNA, 566 bp, Homo sapiens
actagtccagtgtggtggaattcgcggccgcgtcgacggacaggtcagctgtctggctcagtgatctacattctgaagttgtctgaaaatgtcttcatgattaaattcagcctaaacgttttgccgggaacactgcagagacaatgctgtgagtttccaaccttagcccatctgcgggcagagaaggtctagtttgtccatcagcattatcatgatatcaggactggttacttggttaaggaggggtctaggagatctgtcccttttagagacaccttacttataatgaagtatttgggagggtggttttcaaaagtagaaatgtcctgtattccgatgatcatcctgtaaacattttatcatttattaatcatccctgcctgtgtctattattatattcatatctctacgctggaaactttctgcctcaatgtttactgtgcctttgtttttgctagtttgtgttgttgaaaaaaaaaacattctctgcctgagttttaatttttgtccaaagttattttaatctatacaattaaaagcttttgcctatcaaaaaaaaaaaaaaa

SEQ ID NO: 394 - DNA, 384 bp, Homo sapiens
  misc_feature (1)...(384): n = A,T,C or G
gaacatacatgtcccggcacctgagctgcagtctgacatcatcgccatcacgggcctcgctgcaaattnggaccgggccaaggctggactgctggagcgtgtgaaggagctacaggccnagcaggaggaccgggctttaaggagttttaagctgagtgtcactgtagaccccaaataccatcccaagattatcgggagaaagggggcagtaattacccaaatccggttggagcatgacgtgaacatccagtttcctgataaggacgatgggaaccagccccaggaccaaattaccatcacagggtacgaaaagaacacagaagctgccagggatgctatactgagaattgtgggtgaacttgagcagatggtttctgaggacgt

SEQ ID NO: 395 - DNA, 399 bp, Homo sapiens
ggcaaaactgtgtgacctcaataagacctcgcagatccaaggtcaagtatcagaagtgactctgaccttggactccaagacctacatcaacagcctggctatattagatgatgagccagttatcagaggtttcatcattgcggaaattgtggagtctaaggaaatcatggcctctgaagtattcacgtctttccagtaccctgagttctctatagagttgcctaacacaggcagaattggccagctacttgtctgcaattgtatcttcaagaataccctggccatccctttgactgacgtcaagttctctttggaaagcctgggcatctcctcactacagacctctgaccatgggacggtgcagcctggtgagaccatccaatcccaaataaaatgcac

SEQ ID NO: 396 - DNA, 403 bp, Homo sapiens
  misc_feature (1)...(403): n = A,T,C or G
tggagttntcagtgcaaacaagccataaagcttcagtagcaaattactgtctcacagaaagacattttcaacttctgctccagctgctgataaaacaaatcatgtgtttagcttgactccagacaaggacaacctgttccttcataactctctagagaaaaaaaggagttgttagtagatactaaaaaaagtggatgaataatctggatatttttcctaaaaagattccttgaaacacattaggaaaatggagggccttatgatcagaatgctagaattagtccattgtgctgaagcagggtttaggggagggagtgagggataaaagaaggaaaaaaagaagagtgagaaaacctatttatcaaagcaggtgctatcactcaatgttaggccctgctctttt

SEQ ID NO: 397 - DNA, 100 bp, Homo sapiens
  misc_feature (1)...(100): n = A,T,C or G
actagtncagtgtggtggaattcgcggccgcgtcgacctanaanccatctctatagcaaatccatccccgctcctggttggtnacagaatgactgacaaa

SEQ ID NO: 398 - DNA, 278 bp, Homo sapiens
  misc_feature (1)...(278): n = A,T,C or G
gcggccgcgtcgacagcagttccgccagcgctcgcccctgggtggggatgtgctgcacgcccacctggacatctggaagtcagcggcctggatgaaagagcggacttcacctggggcgattcactactgtgcctcgaccagtgaggagagctggaccgacagcgaggtggactcatcatgctccgggcagcccatccacctgtggcagttcctcaaggagttgctactcaagccccacagctatggccgcttcattangtggctcaacaaggagaagg

SEQ ID NO: 399 - DNA, 298 bp, Homo sapiens
  misc_feature (1)...(298): n = A,T,C or G
acggaggtggaggaagcgnccctgggatcganaggatgggtcctgncattgaccncctcnggggtgccngcatggagcgcatgggcgcgggcctgggccacggcatggatcgcgtgggctccgagatcgagcgcatgggcctggtcatggaccgcatgggctccgtggagcgcatgggctccggcattgagcgcatgggcccgctgggcctcgaccacatggcctccancattgancgcatgggccagaccatggagcgcattggctctggcgtggagcncatgggtgccggcatggg

SEQ ID NO: 400 - DNA, 548 bp, Homo sapiens
acatcaactacttcctcattttaaggtatggcagttcccttcatccccttttcctgccttgtacatgtacatgtatgaaatttccttctcttaccgaactctctccacacatcacaaggtcaaagaaccacacgcttagaagggtaagagggcaccctatgaaatgaaatggtgatttcttgagtctcttttttccacgtttaaggggccatggcaggacttagagttgcgagttaagactgcagagggctagagaattatttcatacaggctttgaggccacccatgtcacttatcccgtataccctctcaccatccccttgtctactctgatgcccccaagatgcaactgggcagctagttggccccataattctgggcctttgttgtttgttttaattacttgggcatcccaggaagctttccagtgatctcctaccatgggcccccctcctgggatcaagcccctcccaggccctgtccccagcccctcctgccccagcccacccgcttgccttggtgctcagccctcccattgggagcaggtt

SEQ ID NO: 401 - DNA, 355 bp, Homo sapiens
  misc_feature (1)...(355): n = A,T,C or G
actgtttccatgttatgtttctacacattgctacctcagtgctcctggaaacttagcttttgatgtctccaagtagtccaccttcatttaactctttgaaactgtatcatctttgccaagtaagagtggtggcctatttcagctgctttgacaaaatgactggctcctgacttaacgttctataaatgaatgtgctgaagcaaagtgcccatggtggcggcgaagaaganaaagatgtgttttgttttggactctctgtggtcccttccaatgctgngggtttccaaccaggggaagggtcccttttgcattgccaagtgccataaccatgagcactactctaccatggntctgc

SEQ ID NO: 402 - DNA, 407 bp, Homo sapiens
  misc_feature (1)...(407): n = A,T,C or G
atggggcaagctggataaagaaccaagacccactggagtatgctgtcttcaagaaacccatctcacatgcggtggcatacataggctcaaaataaaggaatggagaaaaatatttcaagcaaatggaaaacagaaaaaagcaggtgttgcactcctactttctgacaaaacagactatgcgaataaagataaaaaagagaaggacattacaaaggtggtcctgacctttgataaatctcattgcttgataccaacctgggctgttttaattgcccaaaccaaaaggataatttgctgaggttgtggagcttctcccctgcagagagtccctgatctcccaaaatttggttgagatgtaaggntgattttgctgacaactccttttctgaagttttactcatttccaa

SEQ ID NO: 403 - DNA, 303 bp, Homo sapiens
  misc_feature (1)...(303): n = A,T,C or G
cagtatttatagccnaactgaaaagctagtagcaggcaagtctcaaatccaggcaccaaatcctaagcaagagccatggcatggtgaaaatgcaaaaggagagtctggccaatctacaaatagagaacaagacctactcagtcatgaacaaaaaggcagacaccaacatggatctcatgggggattggatattgtaattatagagcaggaagatgacagtgatcgtcatttggcacaacatcttaacaacgaccgaaacccattatttacataaacctccattcggtaaccatgttgaaagga

SEQ ID NO: 404 - DNA, 225 bp, Homo sapiens
aagtgtaacttttaaaaatttagtggattttgaaaattcttagaggaaagtaaaggaaaaattgttaatgcactcatttacctttacatggtgaaagttctctcttgatcctacaaacagacattttccactcgtgtttccatagttgttaagtgtatcagatgtgttgggcatgtgaatctccaagtgcctgtgtaataaataaagtatctttatttcattcat

SEQ ID NO: 405 - DNA, 334 bp, Homo sapiens
  misc_feature (1)...(334): n = A,T,C or G
gagctgttatactgtgagttctactaggaaatcatcaaatctgagggttgtctggaggacttcaatacacctccccccatagtgaatcagcttccagggggtccagtccctctccttacttcatccccatcccatgccaaaggaagaccctccctccttggctcacagccttctctaggcttcccagtgcctccaggacagagtgggttatgttttcagctccatccttgctgtgagtgtctggtgcggttgtgcctccagcttctgctcagtgcttcatggacagtgtccagcccatgtcactctccactctctcanngtggatcccacccct

SEQ ID NO: 406 - DNA, 216 bp, Homo sapiens
  misc_feature (1)...(216): n = A,T,C or G
tttcatacctaatgagggagttganatnacatnnaaccaggaaatgcatggatctcaanggaaacaaacacccaataaactcggagtggcagactgacaactgtgagacatgcacttgctacnaaacacaaatttnatgttgcacccttgtttctacacctgtgggttatgacaaagacaactgccaaagaatnttcaagaaggaggactgccant

SEQ ID NO: 407 - DNA, 413 bp, Homo sapiens
gctgacttgctagtatcatctgcattcattgaagcacaagaacttcatgccttgactcatgtaaatgcaataggattaaaaaataaatttgatatcacatggaaacagacaaaaaatattgtacaacattgcacccagtgtcagattctacacctggccactcaggaagcaagagttaatcccagaggtctatgtcctaatgtgttatggcaaatggatgtcatgcacgtaccttcatttggaaaattgtcatttgtccatgtgacagttgatacttattcacatttcatatgggcaacctgccagacaggagaaagtcttcccatgttaaaagacatttattatcttgttttcctgtcatgggagttccagaaaaagttaaaacagacaatgggccaggttctgtagtaaag

SEQ ID NO: 408 - DNA, 183 bp, Homo sapiens
  misc_feature (1)...(183): n = A,T,C or G
ggagctngccctcaattcctccatntctatgttancatatttaatgtcttttgnnattaatncttaactagttaatccttaaagggctanntaatccttaactagtccctccattgtgagcattatccttccagtattcnccttctnttttatttactccttcctggctacccatgtactntt

SEQ ID NO: 409 - DNA, 250 bp, Homo sapiens
  misc_feature (1)...(250): n = A,T,C or G
cccacgcatgataagctctttatttctgtaagtcctgctaggaaatcatcaaatctgacggtggtttgggggacctgaacaaacctcctgtaattaatcagctttcagtttctccccctagtccctccttcaacaacataggaggatcctccccttctttctgctcacggccttatctaggcttcccagtgcccccaggacagcgtgggctatgtttacagcgcntccttgctgggggggggccntatgc

SEQ ID NO: 410 - DNA, 306 bp, Homo sapiens
  misc_feature (1)...(306): n = A,T,C or G
ggctggtttgcaagaatgaaatgaatgattctacagctaggacttaaccttgaaatggaaagtcttgcaatcccatttgcaggatccgtctgtgcacatgcctctgtagagagcagcattcccagggaccttggaaacagttggcactgtaaggtgcttgctccccaagacacatcctaaaaggtgttgtaatggtgaaaaccgcttccttctttattgccccttcttatttatgtgaacnactggttggctttttttgnatcttttttaaactggaaagttcaattgngaaaatgaatatcntgc

SEQ ID NO: 411 - DNA, 261 bp, Homo sapiens
  misc_feature (1)...(261): n = A,T,C or G
agagatattncttaggtnaaagttcatagagttcccatgaactatatgactggccacacaggatcttttgtatttaaggattctgagattttgcttgagcaggattagataaggctgttctttaaatgtctgaaatggaacagatttcaaaaaaaaaccccacaatctagggtgggaacaaggaaggaaagatgtgaataggctgatgggcaaaaaaccaatttacccatcagttccagccttctctcaaggngaggcaaa

SEQ ID NO: 412 - DNA, 241 bp, Homo sapiens
  misc_feature (1)...(241): n = A,T,C or G
gttcaatgttacctgacatttctacaacaccccactcaccgatgtattcgttgcccagtgggaacataccagcctgaatttggaaaaaataattgtgtttcttgcccaggaaatactacgactgactttgatggctccacaaacataacccagtgtaaaaacagaagatgtggaggggagctgggagatttcactgggtacattgaattcccaaactacccangcaattacccagccaaca

SEQ ID NO: 413 - DNA, 231 bp, Homo sapiens
  misc_feature (1)...(231): n = A,T,C or G
aactcttacaatccaagtgactcatctgtgtgcttgaatcctttccactgtctcatctccctcatccaagtttctagtaccttctctttgttgtgaaggataatcaaactgaacaacaaaaagtttactctcctcatttggaacctaaaaactctcttcttcctgggtctgagggctccaagaatccttgaatcanttctcagatcattggggacaccanatcaggaacct

SEQ ID NO: 414 - DNA, 234 bp, Homo sapiens
actgtccatgaagcactgagcagaagctggaggcacaacgcaccagacactcacagcaaggatggagctgaaaacataacccactctgtcctggaggcactgggaagcctagagaaggctgtgagccaaggagggagggtcttcctttggcatgggatggggatgaagtaaggagagggactggaccccctggaagctgattcactatggggggaggtgtattgaagtcctcca

SEQ ID NO: 415 - DNA, 217 bp, Homo sapiens
  misc_feature (1)...(217): n = A,T,C or G
gcataggattaagactgagtatcttttctacattcttttaactttctaaggggcacttctcaaaacacagaccaggtagcaaatctccactgctctaaggntctcaccaccactttctcacacctagcaatagtagaattcagtcctacttctgaggccagaagaatggttcagaaaaatantggattataaaaaataacaattaagaaaaataatc

SEQ ID NO: 416 - DNA, 213 bp, Homo sapiens
  misc_feature (1)...(213): n = A,T,C or G
atgcatatntaaagganactgcctcgcttttagaagacatctggnctgctctctgcatgaggcacagcagtaaagctctttgattcccagaatcaagaactctccccttcagactattaccgaatgcaaggtggttaattgaaggccactaattgatgctcaaatagaaggatattgactatattggaacagatggagtctctactacaaaag

SEQ ID NO: 417 - DNA, 303 bp, Homo sapiens
  misc_feature (1)...(303): n = A,T,C or G
nagtcttcaggcccatcagggaagttcacactggagagaagtcatacatatgtactgtatgtgggaaaggctttactctgagttcaaatcttcaagcccatcagagagtccacactggagagaagccatacaaatgcaatgagtgtgggaagagcttcaggagggattcccattatcaagttcatctagtggtccacacaggagagaaaccctataaatgtgagatatgtgggaagggcttcantcaaagttcgtatcttcaaatccatcngaaggnccacagtatananaaaccttttaagt

SEQ ID NO: 418 - DNA, 328 bp, Homo sapiens
  misc_feature (1)...(328): n = A,T,C or G
tttttggcggtggtggggcagggacgggacangagtctcactctgttgcccaggctggagtgcacaggcatgatctcggctcactacaacccctgcctcccatgtccaagcgattcttgtgcctcagccttccctgtagctagaattacaggcacatgccaccacacccagctagtttttgtatttttagtagagacagggtttcaccatgttggccaggctggtctcaaactcctnacctcagnggtcaggctggtctcaaactcctgacctcaagtgatctgcccacctcagcctcccaaagtgctangattacaggccgtgagcc

SEQ ID NO: 419 - DNA, 389 bp, Homo sapiens
  misc_feature (1)...(389): n = A,T,C or G
cctcctcaagacggcctgtggtccgcctcccggcaaccaagaagcctgcagtgccatatgacccctgagccatggactggagcctgaaaggcagcgtacaccctgctcctgatcttgctgcttgtttcctctctgtggctccattcatagcacagttgttgcactgaggcttgtgcaggccgagcaaggccaagctggctcaaagagcaaccagtcaactctgccacggtgtgccaggcaccggttctccagccaccaacctcactcgctcccgcaaatggcacatcagttcttctaccctaaaggtaggaccaaagggcatctgcttttctgaagtcctctgctctatcagccatcacgtggcagccactcnggctgtgtcgacgcgg

SEQ ID NO: 420 - DNA, 408 bp, Homo sapiens
gttcctcctaactcctgccagaaacagctctcctcaacatgagagctgcacccctcctcctggccagggcagcaagccttagccttggcttcttgtttctgctttttttctggctagaccgaagtgtactagccaaggagttgaagtttgtgactttggtgtttcggcatggagaccgaagtcccattgacacctttcccactgaccccataaaggaatcctcatggccacaaggatttggccaactcacccagctgggcatggagcagcattatgaacttggagagtatataagaaagagatatagaaaattcttgaatgagtcctataaacatgaacaggtttatattcgaagcacagacgttgaccggactttgatgaagtgctatgacaaacctggcaagcccg

SEQ ID NO: 421 - DNA, 352 bp, Homo sapiens
  misc_feature (1)...(352): n = A,T,C or G
gctcaaaaatctttttactgatnggcatggctacacaatcattgactattacggaggccagaggagaatgaggcctggcctgggagccctgtgcctactanaagcacattagattatccattcactgacagaacaggtcttttttgggtccttcttctccaccacnatatacttgcagtcctccttcttgaagattctttggcagttgtctttgtcataacccacaggtgtagaaacaagggtgcaacatgaaatttctgtttcgtagcaagtgcatgtctcacaagttggcangtctgccactccgagtttattgggtgtttgtttcctttgagatccatgcatttcctgg

SEQ ID NO: 422 - DNA, 337 bp, Homo sapiens
atgccaccatgctggcaatgcagcgggcggtcgaaggcctgcatatccagcccaagctggcgatgatcgacggcaaccgttgcccgaagttgccgatgccagccgaagcggtggtcaagggcgatagcaaggtgccggcgatcgcggcggcgtcaatcctggccaaggtcagccgtgatcgtgaaatggcagctgtcgaattgatctacccgggttatggcatcggcgggcataagggctatccgacaccggtgcacctggaagccttgcagcggctggggccgacgccgattcaccgacgcttcttccgccggtacggctggcctatgaaaattat

SEQ ID NO: 423 - DNA, 310 bp, Homo sapiens
  misc_feature (1)...(310): n = A,T,C or G
gctcaaaaatctttttactgatatggcatggctacacaatcattgactattagaggccagaggagaatgaggcctggcctgggagccctgtgcctactanaagcncattagattatccattcactgacagaacaggtcttttttgggtccttcttctccaccacgatatacttgcagtcctccttcttgaagattctttggcagttgtctttgtcataacccacaggtgtanaaacaagggtgcaacatgaaatttctgtttcgtagcaagtgcatgtctcacagttgtcaagtctgccctccgagttta

SEQ ID NO: 424 - DNA, 370 bp, Homo sapiens
  misc_feature (1)...(370): n = A,T,C or G
gctcaaaaatctttttactgataggcatggctacacaatcattgactattagaggccagaggagaatgaggcctggcctgggagccctgtgcctactagaagcacattagattatccattcactgacagaacaggtcttttttgggtccttcttctccaccacgatatacttgcagtcctccttcttgaagattctttggcagttgtctttgtcataacccacaggtgtagaaacatcctggttgaatctcctggaactccctcattaggtatgaaatagcatgatgcattgcataaagtcacgaaggtggcaaagatcacaacgctgcccagganaacattcattgtgataagcaggactccgtcgacg

SEQ ID NO: 425 - DNA, 216 bp, Homo sapiens
  misc_feature (1)...(216): n = A,T,C or G
aattgctatnntttattttgccactcaaaataattaccaaaaaaaaaaaatnttaaatgataacaacncaacatcaaggnaaananaacaggaatggntgactntgcataaatnggccgaanattatccattatnttaagggttgacttcaggntacagcacacagacaaacatgcccaggaggntntcaggaccgctcgatgtnttntgaggagg

SEQ ID NO: 426 - DNA, 596 bp, Homo sapiens
cttccagtgaggataaccctgttgccccgggccgaggttctccattaggctctgattgattggcagtcagtgatggaagggtgttctgatcattccgactgccccaagggtcgctggccagctctctgttttgctgagttggcagtaggacctaatttgttaattaagagtagatggtgagctgtccttgtattttgattaacctaatggccttcccagcacgactcggattcagctggagacatcacggcaacttttaatgaaatgatttgaagggccattaagaggcacttcccgttattaggcagttcatctgcactgataacttcttggcagctgagctggtcggagctgtggcccaaacgcacacttggcttttggttttgagatacaactcttaatcttttagtcatgcttgagggtggatggccttttcagctttaacccaatttgcactgccttggaagtgtagccaggagaatacactcatatactcgtgggcttagaggccacagcagatgtcattggtctactgcctgagtcccgctggtcccatcccaggaccttccatcggcgagtacctgggagcccgtgct

SEQ ID NO: 427 - DNA, 107 bp, Homo sapiens
  misc_feature (1)...(107): n = A,T,C or G
gaagaattcaagttaggtttattcaaagggcttacngagaatcctanacccaggncccagcccgggagcagccttanagagctcctgtttgactgcccggctcagng

SEQ ID NO: 428 - DNA, 38 bp, Homo sapiens
  misc_feature (1)...(38): n = A,T,C or G
gaacttccnaanaangactttattcactattttacatt

SEQ ID NO: 429 - DNA, 544 bp, Homo sapiens
ctttgctggacggaataaaagtggacgcaagcatgacctcctgatgagggcgctgcatttattgaagagcggctgcagccctgcggttcagattaaaatccgagaattgtatagacgccgatatccacgaactcttgaaggactttctgatttatccacaatcaaatcatcggttttcagtttggatggtggctcatcacctgtagaacctgacttggccgtggctggaatccactcgttgccttccacttcagttacacctcactcaccatcctctcctgttggttctgtgctgcttcaagatactaagcccacatttgagatgcagcagccatctcccccaattcctcctgtccatcctgatgtgcagttaaaaaatctgcccttttatgatgtccttgatgttctcatcaagcccacgagtttagttcaaagcagtattcagcgatttcaagagaagttttttatttttgctttgacacctcaacaagttagagagatatgcatatccagggattttttgccaggtggtaggagagattat

SEQ ID NO: 430 - DNA, 507 bp, Homo sapiens
  misc_feature (1)...(507): n = A,T,C or G
cttatcncaatggggctcccaaacttggctgtgcagtggaaactccgggggaattttgaagaacactgacacccatcttccaccccgacactctgatttaattgggctgcagtgagaacagagcatcaatttaaaaagctgcccagaatgttntcctgggcagcgttgtgatctttgccnccttcgtgactttatgcaatgcatcatgctatttcatacctaatgagggagttccaggagattcaaccaggatgtttctacncctgtgggttatgacaaagacaactgccaaagaatnttcaagaaggaggactgcaagtatatcgtggtggagaagaaggacccaaaaaagacctgttctgtcagtgaatggataatctaatgtgcttctagtaggcacagggctcccaggccaggcctcattctcctctggcctctaatagtcaatgattgtgtagccatgcctatcagtaaaaagatttttgagcaaaaaaaaaaaaaaaaaaa

SEQ ID NO: 431 - DNA, 392 bp, Homo sapiens
  misc_feature (1)...(392): n = A,T,C or G
gaaaattcagaatggataaaaacaaatgaagtacaaaatatttcagatttacatagcgataaacaagaaagcacttatcaggaggacttacaaatggaagtacactctanaaccatcatctatcatggctaaatgtgagattagcacagctgtattatttgtacattgcaaacacctagaaagagatgggaaacaaaatcccaggagttttgtgtgtggagtcctgggttttccaacagacatcattccagcattctgagattagggngattggggatcattctggagttggaatgttcaacaaaagtgatgttgttaggtaaaatgtacaacttctggatctatgcagacattgaaggtgcaatgagtctggcttttactctgctgtttct

SEQ ID NO: 432 - DNA, 387 bp, Homo sapiens
  misc_feature (1)...(387): n = A,T,C or G
ggtatccntacataatcaaatatagctgtagtacatgttttcattggngtagattaccacaaatgcaaggcaacatgtgtagatctcttgtcttattcttttgtctataatactgtattgngtagtccaagctctcggnagtccagccactgngaaacatgctccctttagattaacctcgtggacnctnttgttgnattgtctgaactgtagngccctgtattttgcttctgtctgngaattctgttgcttctggggcatttccttgngatgcagaggaccaccacacagatgacagcaatctgaattgntccaatcacagctgcgattaagacatactgaaatcgtacaggaccgggaacaacgtatagaacactggagtccttt

SEQ ID NO: 433 - DNA, 281 bp, Homo sapiens
  misc_feature (1)...(281): n = A,T,C or G
ttcaactagcanagaanactgcttcagggngtgtaaaatgaaaggcttccacgcagttatctgattaaagaacactaagagagggacaaggctagaagccgcaggatgtctacactatagcaggcnctatttgggttggctggaggagctgtggaaaacatggagagattggcgctggagatcgccgtggctattcctcnttgntattacaccagngaggntctctgtntgcccactggttnnaaaaccgntatacaataatgatagaataggacacacat

SEQ ID NO: 434 - DNA, 484 bp, Homo sapiens
ttttaaaataagcatttagtgctcagtccctactgagtactctttctctcccctcctctgaatttaattctttcaacttgcaatttgcaaggattacacatttcactgtgatgtatattgtgttgcaaaaaaaaaaaagtgtctttgtttaaaattacttggtttgtgaatccatcttgctttttccccattggaactagtcattaacccatctctgaactggtagaaaaacatctgaagagctagtctatcagcatctgacaggtgaattggatggttctcagaaccatttcacccagacagcctgtttctatcctgtttaataaattagtttgggttctctacatgcataacaaaccctgctccaatctgtcacataaaagtctgtgacttgaagtttagtcagcacccccaccaaactttatttttctatgtgttttttgcaacatatgagtgttttgaaaataaagtacccatgtcttta

SEQ ID NO: 435 - DNA, 424 bp, Homo sapiens
gcgccgctcagagcaggtcactttctgccttccacgtcctccttcaaggaagccccatgtgggtagctttcaatatcgcaggttcttactcctctgcctctataagctcaaacccaccaacgatcgggcaagtaaaccccctccctcgccgacttcggaactggcgagagttcagcgcagatgggcctgtggggagggggcaagatagatgagggggagcggcatggtgcggggtgaccccttggagagaggaaaaaggccacaagaggggctgccaccgccactaacggagatggccctggtagagacctttgggggtctggaacctctggactccccatgctctaactcccacactctgctatcagaaacttaaacttgaggattttctctgtttttcactcgcaataaattcagagcaaac

SEQ ID NO: 436 - DNA, 667 bp, Homo sapiens
  misc_feature (1)...(667): n = A,T,C or G
accttgggaanactctcacaatataaagggtcgtagactttactccaaattccaaaaaggtcctggccatgtaatcctgaaagttttcccaaggtagctataaaatccttataagggtgcagcctcttctggaattcctctgatttcaaagtctcactctcaagttcttgaaaacgagggcagttcctgaaaggcaggtatagcaactgatcttcagaaagaggaactgtgtgcaccgggatgggctgccagagtaggataggattccagatgctgacaccttctgggggaaacagggctgccaggtttgtcatagcactcatcaaagtccggtcaacgtctgtgcttcgaatataaacctgttcatgtttataggactcattcaagaattttctatatctctttcttatatactctccaagttcataatgctgctccatgcccagctgggtgagttggccaaatccttgtggccatgaggattcctttatggggtcagtgggaaaggtgtcaatgggacttcggtctccatgccgaaacaccaaagtcacaaacttcaactccttggctagtacacttcggtctagccagaaaaaaagcagaaacaagaagccaaggctaaggcttgctgccctgccaggaggaggggtgcagctctcatgttgag

SEQ ID NO: 437 - DNA, 693 bp, Homo sapiens
ctacgtctcaaccctcatttttaggtaaggaatcttaagtccaaagatattaagtgactcacacagccaggtaaggaaagctggattggcacactaggactctaccataccgggttttgttaaagctcaggttaggaggctgataagcttggaaggaacttcagacagctttttcagatcataaaagataattcttagcccatgttcttctccagagcagacctgaaatgacagcacagcaggtactcctctattttcacccctcttgcttctactctctggcagtcagacctgtgggaggccatgggagaaagcagctctctggatgtttgtacagatcatggactattctctgtggaccatttctccaggttaccctaggtgtcactattggggggacagccagcatctttagctttcatttgagtttctgtctgtcttcagtagaggaaacttttgctcttcacacttcacatctgaacacctaactgctgttgctcctgaggtggtgaaagacagatatagagcttacagtatttatcctatttctaggcactgagggctgtggggtaccttgtggtgccaaaacagatcctgttttaaggacatgttgcttcagagatgtctgtaactatctgggggctctgttggctctttaccctgcatcatgtgctctcttggctgaaaatgacc

SEQ ID NO: 438 - DNA, 360 bp, Homo sapiens
ctgcttatcacaatgaatgttctcctgggcagcgttgtgatctttgccaccttcgtgactttatgcaatgcatcatgctatttcatacctaatgagggagttccaggagattcaaccaggatgtttctacacctgtgggttatgacaaagacaactgccaaagaatcttcaagaaggaggactgcaagtatatctggtggagaagaaggacccaaaaaagacctgttctgtcagtgaatggataatctaatgtgcttctagtaggcacagggctcccaggccaggcctcattctcctctggcctctaatagtcaataattgtgtagccatgcctatcagtaaaaagatttttgagcaaac

SEQ ID NO: 439 - DNA, 431 bp, Homo sapiens
  misc_feature (1)...(431): n = A,T,C or G
gttcctnntaactcctgccagaaacagctctcctcaacatgagagctgcacccctcctcctggccagggcagcaagccttagccttggcttcttgtttctgctttttttctggctagaccgaagtgtactagccaaggagttgaagtttgtgactttggtgtttcggcatggagaccgaagtcccattgacacctttcccactgaccccataaaggaatcctcatggccacaaggatttggccaactcacccagctgggcatggagcagcattatgaacttggagagtatataagaaagagatatagaaaattcttgaatgagtcctataaacatgaacaggtttatattcgaagcacagacgttgaccggactttgatgagtgctatgacaaacctggcagcccgtcgacgcggccgcgaatttagtagt

SEQ ID NO: 440 - DNA, 523 bp, Homo sapiens
agagataaagcttaggtcaaagttcatagagttcccatgaactatatgactggccacacaggatcttttgtatttaaggattctgagattttgcttgagcaggattagataaggctgttctttaaatgtctgaaatggaacagatttcaaaaaaaaaccccacaatctagggtgggaacaaggaaggaaagatgtgaataggctgatgggcaaaaaaccaatttacccatcagttccagccttctctcaaggagaggcaaagaaaggagatacagtggagacatctggaaagttttctccactggaaaactgctactatctgtttttatatttctgttaaaatatatgaggctacagaactaaaaattaaaacctctttgtgtcccttggtcctggaacatttatgttccttttaaagaaacaaaaatcaaactttacagaaagatttgatgtatgtaatacatatagcagctcttgaagtatatatatcatagcaaataagtcatctgatgagaacaagcta

SEQ ID NO: 441 - DNA, 430 bp, Homo sapiens
gttcctcctaactcctgccagaaacagctctcctcaacatgagagctgcacccctcctcctggccagggcagcaagccttagccttggcttcttgtttctgctttttttctggctagaccgaagtgtactagccaaggagttgaagtttgtgactttggtgtttcggcatggagaccgaagtcccattgacacctttcccactgaccccataaaggaatcctcatggccacaaggatttggccaactcacccagctgggcatggagcagcattatgaacttggagagtatataagaaagagatatagaaaattcttgaatgagtcctataaacatgaacaggtttatattcgaagcacagacgttgaccggactttgatgagtgctatgacaaacctggcagcccgtcgacgcggccgcgaatttagtag

SEQ ID NO: 442 - DNA, 362 bp, Homo sapiens
ctaaggaattagtagtgttcccatcacttgtttggagtgtgctattctaaaagattttgatttcctggaatgacaattatattttaactttggtgggggaaagagttataggaccacagtcttcacttctgatacttgtaaattaatcttttattgcacttgttttgaccattaagctatatgtttagaaatggtcattttacggaaaaattagaaaaattctgataatagtgcagaataaatgaattaatgttttacttaatttatattgaactgtcaatgacaaataaaaattctttttgattattttttgttttcatttaccagaataaaaactaagaattaaaagtttgattacagtc

SEQ ID NO: 443 - DNA, 624 bp, Homo sapiens
  misc_feature (1)...(624): n = A,T,C or G
ttttttttttgcaacacaatatacatcacagtgaaatgtgtaatccttgcaaattgcaagttgaaagaattaaattcagaggaggggagagaaagagtactcagtagggactgagcactaaatgcttattttaaaagaaatgtaaagagcagaaagcaattcaggctaccctgccttttgtgctggctagtactccggtcggtgtcagcagcacgtggcattgaacattgcaatgtggagcccaaaccacagaaaatggggtgaaattggccaactttctattaacttggcttcctgttttataaaatattgtgaataatatcacctacttcaaagggcagttatgaggcttaaatgaactaacgcctacaaaacacttaaacatagataacataggtgcaagtactatgtatctggtacatggtaaacatccttattattaaagtcaacgctaaaatgaatgtgtgtgcatatgctaatagtacagagagagggcacttaaaccaactaagggcctggagggaaggtttcctggaaagangatgcttgtgctgggtccaaatcttggtctactatgaccttggccaaattatttaaactttgtccctatctgctaaacagatc

SEQ ID NO: 444 - DNA, 425 bp, Homo sapiens
  misc_feature (1)...(425): n = A,T,C or G
gcacatcattnntcttgcattctttgagaataagaagatcagtaaatagttcagaagtgggaagctttgtccaggcctgtgtgtgaacccaatgttttgcttagaaatagaacaagtaagttcattgctatagcataacacaaaatttgcataagtggtggtcagcaaatccttgaatgctgcttaatgtgagaggttggtaaaatcctttgtgcaacactctaactccctgaatgttttgctgtgctgggacctgtgcatgccagacaaggccaagctggctgaaagagcaaccagccacctctgcaatctgccacctcctgctggcaggatttgtttttgcatcctgtgaagagccaaggaggcaccagggcataagtgagtagacttatggtcgacgcggccgcgaatttagtagtagtaga

SEQ ID NO: 445 - DNA, 414 bp, Homo sapiens
  misc_feature (1)...(414): n = A,T,C or G
catgtttatgnttttggattactttgggcacctagtgtttctaaatcgtctatcattcttttctgtttttcaaaagcagagatggccagagtctcaacaaactgtatcttcaagtctttgtgaaattctttgcatgtggcagattattggatgtagtttcctttaactagcatataaatctggtgtgtttcagataaatgaacagcaaaatgtggtggaattaccatttggaacattgtgaatgaaaaattgtgtctctagattatgtaacaaataactatttcctaaccattgatctttggatttttataatcctactcacaaatgactaggcttctcctcttgtattttgaagcagtgtgggtgctggattgataaaaaaaaaaaaagtcgacgcggccgcgaatttagtag

SEQ ID NO: 446 - DNA, 631 bp, Homo sapiens
  misc_feature (1)...(631): n = A,T,C or G
acaaattagaanaaagtgccagagaacaccacataccttgtccggaacattacaatggcttctgcatgcatgggaagtgtgagcattctatcaatatgcaggagccatcttgcaggtgtgatgctggttatactggacaacactgtgaaaaaaaggactacagtgttctatacgttgttcccggtcctgtacgatttcagtatgtcttaatcgcagctgtgattggaacaattcagattgctgtcatctgtgtggtggtcctctgcatcacaagggccaaactttaggtaatagcattggactgagatttgtaaactttccaaccttccaggaaatgccccagaagcaacagaattcacagacagaagcaaaatacagggcactacagttcagacaatacaacaagagcgtccacgaggttaatctaaagggagcatgtttcacagtggctggactaccgagagcttggactacacaatacagtattatagacaaaagaataagacaagagatctacacatgttgccttgcatttgtggtaatctacaccaatgaaaacatgtactacagctatatttgattatgtatggatatatttgaaatagtatacattgtcttgatgttttttctg

SEQ ID NO: 447 - DNA, 585 bp, Homo sapiens
  misc_feature (1)...(585): n = A,T,C or G
ccttgggaaaantntcacaatataaagggtcgtagactttactccaaattccaaaaaggtcctggccatgtaatcctgaaagttttcccaaggtagctataaaatccttataagggtgcagcctcttctggaattcctctgatttcaaagtctcactctcaagttcttgaaaacgagggcagttcctgaaaggcaggtatagcaactgatcttcagaaagaggaactgtgtgcaccgggatgggctgccagagtaggataggattccagatgctgacaccttctgggggaaacagggctgccaggtttgtcatagcactcatcaaagtccggtcaacgtctgtgcttcgaatataaacctgttcatgtttataggactcattcaagaattttctatatctctttcttatatactctccaagttcataatgctgctccatgcccagctgggtgagttggccaaatccttgtggccatgaggattcctttatggggtcagtgggaaaggtgtcaatgggacttcggtctccatgccgaaacaccaaagtcacaaacttcaactccttggctagtacacttcggtcta

SEQ ID NO: 448 - DNA, 93 bp, Homo sapiens
  misc_feature (1)...(93): n = A,T,C or G
tgctcgtgggtcattctgannnccgaactgaccntgccagccctgccgangggccnccatggctccctagtgccctggagagganggggctag

SEQ ID NO: 449 - DNA, 706 bp, Homo sapiens
  misc_feature (1)...(706): n = A,T,C or G
ccaagttcatgctntgtgctggacgctggacagggggcaaaagcnnttgctcgtgggtcattctgancaccgaactgaccatgccagccctgccgatggtcctccatggctccctagtgccctggagaggaggtgtctagtcagagagtagtcctggaaggtggcctctgngaggagccacggggacagcatcctgcagatggtcgggcgcgtcccattcgccattcaggctgcgcaactgttgggaagggcgatcggtgcgggcctcttcgctattacgccagctggcgaaagggggatgtgctgcaaggcgattaagttgggtaacgccagggttttcccagtcncgacgttgtaaaacgacggccagtgaattgaatttaggtgacnctatagaagagctatgacgtcgcatgcacgcgtacgtaagcttggatcctctagagcggccgcctactactactaaattcgcggccgcgtcgacgtgggatccncactgagagagtggagagtgacatgtgctggacnctgtccatgaagcactgagcagaagctggaggcacaacgcnccagacactcacagctactcaggaggctgagaacaggttgaacctgggaggtggaggttgcaatgagctgagatcaggccnctgcnccccagcatggatgacagagtgaaactccatcttaaaaaaaaaaaaaaaaa

SEQ ID NO: 450 - DNA, 493 bp, Homo sapiens
gagacggagtgtcactctgttgcccaggctggagtgcagcaagacactgtctaagaaaaaacagttttaaaaggtaaaacaacataaaaagaaatatcctatagtggaaataagagagtcaaatgaggctgagaactttacaaagggatcttacagacatgtcgccaatatcactgcatgagcctaagtataagaacaacctttggggagaaaccatcatttgacagtgaggtacaattccaagtcaggtagtgaaatgggtggaattaaactcaaattaatcctgccagctgaaacgcaagagacactgtcagagagttaaaaagtgagttctatccatgaggtgattccacagtcttctcaagtcaacacatctgtgaactcacagaccaagttcttaaaccactgttcaaactctgctacacatcagaatcacctggagagctttacaaactcccattgccgagggtcgacgcggccgcgaatttagtag

SEQ ID NO: 451 - DNA, 501 bp, Homo sapiens
  misc_feature (1)...(501): n = A,T,C or G
gggcgcgtcccattcgccattcaggctgcgcaactgttgggaagggcgatcggtgcgggcctcttcgctattacgccagctggcgaaagggggatgtgctgcaaggcgattaagttgggtaacgccagggttttcccagtcncgacgttgtaaaacgacggccagtgaattgaatttaggtgacnctatagaagagctatgacgtcgcatgcacgcgtacgtaagcttggatcctctagagcggccgcctactactactaaattcgcggccgcgtcgacgtgggatccncactgagagagtggagagtgacatgtgctggacnctgtccatgaagcactgagcagaagctggaggcacaacgcnccagacactcacagctactcaggaggctgagaacaggttgaacctgggaggtggaggttgcaatgagctgagatcaggccnctgcnccccagcatggatgacagagtgaaactccatcttaaaaaaaaaaaaaaaaa

SEQ ID NO: 452 - DNA, 51 bp, Homo sapiens
  misc_feature (1)...(51): n = A,T,C or G
agacggtttcaccnttacaacnccttttaggatgggnnttggggagcaagc

SEQ ID NO: 453 - DNA, 317 bp, Homo sapiens
  misc_feature (1)...(317): n = A,T,C or G
tacatcttgctttttccccattggaactagtcattaacccatctctgaactggtagaaaaacatctgaagagctagtctatcagcatctggcaagtgaattggatggttctcagaaccatttcacccanacagcctgtttctatcctgtttaataaattagtttgggttctctacatgcataacaaaccctgctccaatctgtcacataaaagtctgtgacttgaagtttantcagcacccccaccaaactttatttttctatgtgttttttgcaacatatgagtgttttgaaaataaggtacccatgtctttatta

SEQ ID NO: 454 - DNA, 231 bp, Homo sapiens
ttcgaggtacaatcaactctcagagtgtagtttccttctatagatgagtcagcattaatataagccacgccacgctcttgaaggagtcttgaattctcctctgctcactcagtagaaccaagaagaccaaattcttctgcatcccagcttgcaaacaaaattgttcttctaggtctccacccttcctttttcagtgttccaaagctcctcacaatttcatgaacaacagct

SEQ ID NO: 455 - DNA, 231 bp, Homo sapiens
taccaaagagggcataataatcagtctcacagtagggttcaccatcctccaagtgaaaaacattgttccgaatgggctttccacaggctacacacacaaaacaggaaacatgccaagtttgtttcaacgcattgatgacttctccaaggatcttcctttggcatcgaccacattcaggggcaaagaatttctcatagcacagctcacaatacagggctcctttctcctcta

SEQ ID NO: 456 - DNA, 231 bp, Homo sapiens
ttggcaggtacccttacaaagaagacaccataccttatgcgttattaggtggaataatcattccattcagtattatcgttattattcttggagaaaccctgtctgtttactgtaaccttttgcactcaaattcctttatcaggaataactacatagccactatttacaaagccattggaacctttttatttggtgcagctgctagtcagtccctgactgacattgccaagt

SEQ ID NO: 457 - DNA, 231 bp, Homo sapiens
  misc_feature (1)...(231): n = A,T,C or G
cgaggtacccaggggtctgaaaatctctnntttantagtcgatagcaaaattgttcatcagcattccttaatatgatcttgctataattagatttttctccattagagttcatacagttttatttgattttattagcaatctctttcagaagacccttgagatcattaagctttgtatccagttgtctaaatcgatgcctcatttcctctgaggtgtcgctggcttttgtg

SEQ ID NO: 458 - DNA, 231 bp, Homo sapiens
aggtctggttccccccacttccactcccctctactctctctaggactgggctgggccaagagaagaggggtggttagggaagccgttgagacctgaagccccaccctctaccttccttcaacaccctaaccttgggtaacagcatttggaattatcatttgggatgagtagaatttccaaggtcctgggttaggcattttggggggccagaccccaggagaagaagattct

SEQ ID NO: 459 - DNA, 231 bp, Homo sapiens
ggtaccgaggctcgctgacacagagaaaccccaacgcgaggaaaggaatggccagccacaccttcgcgaaacctgtggtggcccaccagtcctaacgggacaggacagagagacagagcagccctgcactgttttccctccaccacagccatcctgtccctcattggctctgtgctttccactatacacagtcaccgtcccaatgagaaacaagaaggagcaccctccaca

SEQ ID NO: 460 - DNA, 231 bp, Homo sapiens
gcaggtataacatgctgcaacaacagatgtgactaggaacggccggtgacatggggagggcctatcaccctattcttgggggctgcttcttcacagtgatcatgaagcctagcagcaaatcccacctccccacacgcacacggccagcctggagcccacagaagggtcctcctgcagccagtggagcttggtccagcctccagtccacccctaccaggcttaaggatagaa

SEQ ID NO: 461 - DNA, 231 bp, Homo sapiens
cgaggtttgagaagctctaatgtgcaggggagccgagaagcaggcggcctagggagggtcgcgtgtgctccagaagagtgtgtgcatgccagaggggaaacaggcgcctgtgtgtcctgggtggggttcagtgaggagtgggaaattggttcagcagaaccaagccgttgggtgaataagagggggattccatggcactgatagagccctatagtttcagagctgggaatt

SEQ ID NO: 462 - DNA, 231 bp, Homo sapiens
aggtaccctcattgtagccatgggaaaattgatgttcagtggggatcagtgaattaaatggggtcatgcaagtataaaaattaaaaaaaaaagacttcatgcccaatctcatatgatgtggaagaactgttagagagaccaacagggtagtgggttagagatttccagagtcttacattttctagaggaggtatttaatttcttctcactcatccagtgttgtatttagga

SEQ ID NO: 463 - DNA, 231 bp, Homo sapiens
tactccagcctggtgacagagcgagaccctatcaccgccccccaccccaccaaaaaaaaaactgagtagacaggtgtcctcttggcatggtaagtcttaagtcccctcccagatctgtgacatttgacaggtgtcttttcctctggacctcggtgtccccatctgagtgagaaaaggcagtggggaggtggatcttccagtcgaagcggtatagaagcccgtgtgaaaagc

SEQ ID NO: 464 - DNA, 231 bp, Homo sapiens
gtactctaagattttatctaagttgccttttctgggtgggaaagtttaaccttagtgactaaggacatcacatatgaagaatgtttaagttggaggtggcaacgtgaattgcaaacagggcctgcttcagtgactgtgtgcctgtagtcccagctactcgggagtctgtgtgaggccaggggtgccagcgcaccagctagatgctctgtaacttctaggccccattttccc

SEQ ID NO: 465 - DNA, 231 bp, Homo sapiens
catgttgttgtagctgtggtaatgctggctgcatctcagacagggttaacttcagctcctgtggcaaattagcaacaaattctgacatcatatttatggtttctgtatctttgttgatgaaggatggcacaatttttgcttgtgttcataatatactcagattagttcagctccatcagataaactggagacatgcaggacattagggtagtgttgtagctctggtaatga

SEQ ID NO: 466 - DNA, 231 bp, Homo sapiens
caggtacctctttccattggatactgtgctagcaagcatgctctccggggtttttttaatggccttcgaacagaacttgccacatacccaggtataatagtttctaacatttgcccaggacctgtgcaatcaaatattgtggagaattccctagctggagaagtcacaaagactataggcaataatggagaccagtcccacaagatgacaaccagtcgttgtgtgcggctg

SEQ ID NO: 467 - DNA, 311 bp, Homo sapiens
gtacaccctggcacagtccaatctgaactggttcggcactcatctttcatgagatggatgtggtggcttttctcctttttcatcaagactcctcagcagggagcccagaccagcctgcactgtgccttaacagaaggtcttgagattctaagtgggaatcatttcagtgactgtcatgtggcatgggtctctgcccaagctcgtaatgagactatagcaaggcggctgtgggacgtcagttgtgacctgctgggcctcccaatagactaacaggcagtgccagttggacccaagagaagactgcagcagac

SEQ ID NO: 468 - DNA, 3112 bp, Homo sapiens
cattgtgttgggagaaaaacagaggggagatttgtgtggctgcagccgagggagaccaggaagatctgcatggtgggaaggacctgatgatacagagtttgataggagacaattaaaggctggaaggcactggatgcctgatgatgaagtggactttcaaactggggcactactgaaacgatgggatggccagagacacaggagatgagttggagcaagctcaataacaaagtggttcaacgaggacttggaattgcatggagctggagctgaagtttagcccaattgtttactagttgagtgaatgtggatgattggatgatcatttctcatctctgagcctcaggttccccatccataaaatgggatacacagtatgatctataaagtgggatatagtatgatctacttcactgggttatttgaaggatgaattgagataatttatttcaggtgcctagaacaatgcccagattagtacatttggtggaactgagaaatggcataacaccaaatttaatatatgtcagatgttactatgattatcattcaatctcatagttttgtcatggcccaatttatcctcacttgtgcctcaacaaattgaactgttaacaaaggaatctctggtcctgggtaatggctgagcaccactgagcatttccattccagttggcttcttgggtttgctagctgcatcactagtcatcttaaataaatgaagttttaacatttctccagtgatttttttatctcacctttgaagatactatgttatgtgattaaataaagaacttgagaagaacaggtttcattaaacataaaatcaatgtagacgcaaattttctggatgggcaatacttatgttcacaggaaatgctttaaaatatgcagaagataattaaatggcaatggacaaagtgaaaaacttagactttttttttttttttggaagtatctggatgttccttagtcacttaaaggagaactgaaaaatagcagtgagttccacataatccaacctgtgagattaaggctctttgtggggaaggacaaagatctgtaaatttacagtttccttccaaagccaacgtcgaattttgaaacatatcaaagctcttcttcaagacaaataatctatagtacatctttcttatgggatgcacttatgaaaaatggtggctgtcaacatctagtcactttagctctcaaaatggttcattttaagagaaagttttagaatctcatatttattcctgtggaaggacagcattgtggcttggactttataaggtctttattcaactaaataggtgagaaataagaaaggctgctgactttaccatctgaggccacacatctgctgaaatggagataattaacatcactagaaacagcaagatgacaatataatgtctaagtagtgacatgtttttgcacatttccagcccctttaaatatccacacacacaggaagcacaaaaggaagcacagagatccctgggagaaatgcccggccgccatcttgggtcatcgatgagcctcgccctgtgcctggtcccgcttgtgagggaaggacattagaaaatgaattgatgtgttccttaaaggatgggcaggaaaacagatcctgttgtggatatttatttgaacgggattacagatttgaaatgaagtcacaaagtgagcattaccaatgagaggaaaacagacgagaaaatcttgatggcttcacaagacatgcaacaaacaaaatggaatactgtgatgacatgaggcagccaagctggggaggagataaccacggggcagagggtcaggattctggccctgctgcctaaactgtgcgttcataaccaaatcatttcatatttctaaccctcaaaacaaagctgttgtaatatctgatctctacggttccttctgggcccaacattctccatatatccagccacactcatttttaatatttagttcccagatctgtactgtgacctttctacactgtagaataacattactcattttgttcaaagacccttcgtgttgctgcctaatatgtagctgactgtttttcctaaggagtgttctggcccaggggatctgtgaacaggctgggaagcatctcaagatctttccagggttatacttactagcacacagcatgatcattacggagtgaattatctaatcaacatcatcctcagtgtctttgcccatactgaaattcatttcccacttttgtgcccattctcaagacctcaaaatgtcattccattaatatcacaggattaacttttttttttaacctggaagaattcaatgttacatgcagctatgggaatttaattacatattttgttttccagtgcaaagatgactaagtcctttatccctcccctttgtttgattttttttccagtataaagttaaaatgcttagccttgtactgaggctgtatacagccacagcctctccccatccctccagccttatctgtcatcaccatcaacccctcccatgcacctaaacaaaatctaacttgtaattccttgaacatgtcaggcatacattattccttctgcctgagaagctcttccttgtctcttaaatctagaatgatgtaaagttttgaataagttgactatcttacttcatgcaaagaagggacacatatgagattcatcatcacatgagacagcaaatactaaaagtgtaatttgattataagagtttagataaatatatgaaatgcaagagccacagagggaatgtttatggggcacgtttgtaagcctgggatgtgaagcaaaggcagggaacctcatagtatcttatataatatacttcatttctctatctctatcacaatatccaacaagcttttcacagaattcatgcagtgcaaatccccaaaggtaacctttatccatttcatggtgagtgcgctttagaattttggcaaatcatactggtcacttatctcaactttgagatgtgtttgtccttgtagttaattgaaagaaatagggcactcttgtgagccactttagggttcactcctggcaataaagaatttacaaagagcaaaaaaaaaaaaaaaaaaaaaaaa

SEQ ID NO: 469 - DNA, 2229 bp, Homo sapiens
agctctttgtaaattctttattgccaggagtgaaccctaaagtggctcacaagagtgccctatttctttcaattaactacaaggacaaacacatctcaaagttgagataagtgaccagtatgatttgccaaaattctaaagcgcactcaccatgaaatggataaaggttacctttggggatttgcactgcatgaattctgtgaaaagcttgttggatattgtgatagagatagagaaatgaagtatattatataagatactatgaggttccctgcctttgcttcacatcccaggcttacaaacgtgccccataaacattccctctgtggctcttgcatttcatatatttatctaaactcttataatcaaatacacttttagtatttgctgtctcatgtgatgatgaatctcatatgtgtcccttctttgcatgaagtaagatagtcaacttattcaaaactttacatcattctagatttaagagacaaggaagagcttctcaggcagaaggaataatgtatgcctgacatgttcaaggaattacaagttagattttgtttaggtgcatgggaggggttgatggtgatgacagataaggctggagggatggggagaggctgtggctgtatacagcctcagtacaaggctaagcattttaactttatactggaaaaaaaatcaaacaaaggggagggataaaggacttagtcatctttgcactggaaaacaaaatatgtaattaaattcccatagctgcatgtaacattgaattcttccaggttaaaaaaaaagttaatcctgtgatattaatggaatgacattttgaggtcttgagaatgggcacaaaagtgggaaatgaatttcagtatgggcaaagacactgaggatgatgttgattagataattcactccgtaatgatcatgctgtgtgctagtaagtataaccctggaaagatcttgagatgcttcccagcctgttcacagatcccctgggccagaacactccttaggaaaaacagtcagctacatattaggcagcaacacgaagggtctttgaacaaaatgagtaatgttattctacagtgtagaaaggtcacagtacagatctgggaactaaatattaaaaatgagtgtggctggatatatggagaatgttgggcccagaaggaaccgtagagatcagatattacaacagctttgttttgagggttagaaatatgaaatgatttggttatgaacgcacagtttaggcagcagggccagaatcctgaccctctgccccgtggttatctcctccccagcttggctgcctcatgtcatcacagtattccattttgtttgttgcatgtcttgtgaagccatcaagattttctcgtctgttttcctctcattggtaatgctcactttgtgacttcatttcaaatctgtaatcccgttcaaataaatatccacaacaggatctgttttcctgcccatcctttaaggaacacatcaattcattttctaatgtccttccctcacaagcgggaccaggcacagggcgaggctcatcgatgacccaagatggcggccgggcatttctcccagggatctctgtgcttccttttgtgcttcctgtgtgtgtggatatttaaaggggctggaaatgtgcaaaaacatgtcactacttagacattatattgtcatcttgctgtttctagtgatgttaattatctccatttcagcagatgtgtggcctcagatggtaaagtcagcagcctttcttatttctcacctggaaatacatacgaccatttgaggagacaaatggcaaggtgtcagcataccctgaacttgagttgagagctacacacaatattattggtttccgagcatcacaaacaccctctctgtttcttcactgggcacagaattttaatacttatttcagtgggctgttggcaggaacaaatgaagcaatctacataaagtcactagtgcagtgcctgacacacaccattctcttgaggtcccctctagagatcccacaggtcatatgacttcttggggagcagtggctcacacctgtaatcccagcactttgggaggctgaggcaggtgggtcacctgaggtcaggagttcaagaccagcctggccaatatggtgaaaccccatctctactaaaaatacaaaaattagctgggcgtgctggtgcatgcctgtaatcccagccccaacacaatggaatt

SEQ ID NO: 470 - DNA, 2426 bp, Homo sapiens
gtaaattctttattgccaggagtgaaccctaaagtggctcacaagagtgccctatttctttcaattaactacaaggacaaacacatctcaaagttgagataagtgaccagtatgatttgccaaaattctaaagcgcactcaccatgaaatggataaaggttacctttggggatttgcactgcatgaattctgtgaaaagcttgttggatattgtgatagagatagagaaatgaagtatattatataagatactatgaggttccctgcctttgcttcacatcccaggcttacaaacgtgccccataaacattccctctgtggctcttgcatttcatatatttatctaaactcttataatcaaattacacttttagtatttgctgtctcatgtgatgatgaatctcatatgtgtcccttctttgcatgaagtaagatagtcaacttattcaaaactttacatcattctagatttaagagacaaggaagagcttctcaggcagaaggaataatgtatgcctgacatgttcaaggaattacaagttagattttgtttaggtgcatgggaggggttgatggtgatgacagataaggctggagggatggggagaggctgtggctgtatacagcctcagtacaaggctaagcattttaactttatactggaaaaaaaatcaaacaaaggggagggataaaggacttagtcatctttgcactggaaaacaaaatatgtaattaaattcccatagctgcatgtaacattgaattcttccaggttaaaaaaaaaagttaatcctgtgatattaatggaatgacattttgaggtcttgagaatgggcacaaaagtgggaaatgaatttcagtatgggcaaagacactgaggatgatgttgattagataattcactccgtaatgatcatgctgtgtgctagtaagtataaccctggaaagatcttgagatgcttcccagcctgttcacagatcccctgggccagaacactccttaggaaaaacagtcagctacatattaggcagcaacacgaagggtctttgaacaaaatgagtaatgttattctacagtgtagaaaggtcacagtacagatctgggaactaaatattaaaaatgagtgtggctggatatatggagaatgttgggcccagaaggaaccgtagagatcagatattacaacagctttgttttgagggttagaaatatgaaatgatttggttatgaacgcacagtttaggcagcagggccagaatcctgaccctctgccccgtggttatctcctccccagcttggctgcctcatgtcatcacagtattccattttgtttgttgcatgtcttgtgaagccatcaagattttctcgtctgttttcctctcattggtaatgctcactttgtgacttcatttcaaatctgtaatcccgttcaaataaatatccacaacaggatctgttttcctgcccatcctttaaggaacacatcaattcattttctaatgtccttccctcacaagcgggaccaggcacagggcgaggctcatcgatgacccaagatggcggccgggcatttctcccagggatctctgtgcttccttttgtgcttcctgtgtgtgtggatatttaaaggggctggaaatgtgcaaaaacatgtcactacttagacattatattgtcatcttgctgtttctagtgatgttaattatctccatttcagcagatgtgtggcctcagatggtaaagtcagcagcctttcttatttctcacctggaaatacatacgaccatttgaggagacaaatggcaaggtgtcagcataccctgaacttgagttgagagctacacacaatattattggtttccgagcatcacaaacaccctctctgtttcttcactgggcacagaattttaatacttatttcagtgggctgttggcaggaacaaatgaagcaatctacataaagtcactagtgcagtgcctgacacacaccattctcttgaggtcccctctagagatcccacaggtcatatgacttcttggggagcagtggctcacacctgtaatcccagcactttgggaggctgaggcaggtgggtcacctgaggtcaggagttcaagaccagcctggccaatatggtgaaaccccatctctactaaaaatacaaaaattagctgggcgtgctggtgcatgcctgtaatcccagctacttgggaggctgaggcaggagaattgctggaacatgggaggcggaggttgcagtgagctgtaattgtgccattgcactcgaacctgggcgacagagtggaactctgtttccaaaaaacaaacaaacaaaaaaggcatagtcagatacaacgtgggtgggatgtgtaaatagaagcaggatataaagggcatggggtgacggttttgcccaacacaatg

SEQ ID NO: 471 - DNA, 812 bp, Homo sapiens
gaacaaaatgagtaatgttattctacagtgtagaaaggtcacagtacagatctgggaactaaatattaaaaatgagtgtggctggatatatggagaatgttgggcccagaaggaaccgtagagatcagatattacaacagctttgttttgagggttagaaatatgaaatgatttggttatgaacgcacagtttaggcagcagggccagaatcctgaccctctgccccgtggttatctcctccccagcttggctgcctcatgtcatcacagtattccattttgtttgttgcatgtcttgtgaagccatcaagattttctcgtctgttttcctctcattggtaatgctcactttgtgacttcatttcaaatctgtaatcccgttcaaataaatatccacaacaggatctgttttcctgcccatcctttaaggaacacatcaattcattttctaatgtccttccctcacaagcgggaccaggcacagggcgaggctcatcgatgacccaagatggcggccgggcatttctcccagggatctctgtgcttccttttgtgcttcctgtgtgtgtggatatttaaaggggctggaaatgtgcaaaaacatgtcactacttagacattatattgtcatcttgctgtttctagtgatgttaattatctccatttcagcagatgtgtggcctcagatggtaaagtcagcagcctttcttatttctcacctctgtatcatcaggtccttcccaccatgcagatcttcctggtctccctcggctgcagccacacaaatctcccctctgtttttctgatgccag

SEQ ID NO: 472 - DNA, 515 bp, Homo sapiens
  misc_feature (1)...(515): n = A,T,C or G
acggagacttattttctgatattgtctgcatatgtatgtttttaagagtctggaaatagtcttatgactttcctatcatgcttattaataaataatacagcccagagaagatgaaaatgggttccagaattattggtccttgcagcccggtgaatctcagcaagaggaaccaccaactgacaatcaggatattgaacctggacaagagagagaaggaacacctccgatcgaagaacgtaaagtagaaggtgattgccaggaaatggatctggaaaagactcggagtgagcgtggagatggctctgatgtaaaagagaagactccacctaatcctaagcatgctaagactaaagaagcaggagatgggcagccataagttaaaaagaagacaagctgaagctacacacatggctgatgtcacattgaaaatgtgactgaaaatttgaaaattctctcaataaagtttgagttttctctgaagaaaaaaaaanaaaaaaaaaaaanaaaaanaaaaa

SEQ ID NO: 473 - DNA, 5829 bp, Homo sapiens
cgcatgccggggaagcccaagctggctcgaagagccaccagccacctgtgcaagggtgggcctggaccagttggaccagccaccaagctcacctactcaaggaagcagggatggccaggttgcaacagcctgagtggctgccacctgatagctgatggagcagaggcctgaggaaaatcagatggcacatttagctctttaatggatcttaagttaatttttctataaagcacatggcaccagtccatgcctcagagctcgtatggcactgcggaccacagcaggccgagttcccaggattgccatccaggggggccttctgtagccctggccagaccttgcagaggtggctgggtgctctttgagcgagctcggcctccctggcatgcacaggccccaggtactgacacgctgctctgagtgagcttgtcctgccttggctgccacctaactgctgatggagcagcggccttaggaaaagcaaatggcgctgtagcccaactttagggtagaagaagatgtaccatgtccggccgctagttggtgactggtgcacctgctcctggcgtacccttgcagaggtgggtggttgctctttggccagcttggccttgcctggcatgcacaagcctcagtgcaacaactgtcctacaaatggagacacagagaggaaacaagcagcgggctcaggagcagggtgtgtgctgcctttggggctccagtccatgcctcgggtcgtatggtactgcaggcttcttggttgccaagaggcggaccacaggccttcttgaggaggactttacgttcaagtgcagaaagcagccaaaattaccatccatgagactaagccttctgtggccctggcgagacttaaaatttgtgccaaggcaggacaagctcactcggagcagcgtgtcagtagctggggcctatgcatgccgggcagggccgggctggctgaaggagcaaccagccacctctgcaagggtgcgcctagtgcaggcggagcatccaccacctcacccgctcgaggaagtggggatggccaggttcccacagcctgagtgtctgccaccttattgctgatggagcagaggccttaagaaaagcagatggcactgtggccctacctttagggtggaagaagtgatgtacatgtccggacgctaattggtgactggtacaccggctcctgctacacctttgcagaggtggctggttgctctttgagccagcttgtccttgcccggcatgcacaagtttcagtgcaacaactttgccacaaatggagccatatagaggaaacaagaagcaggttcaggagaagggtgtaccctgcctttggggctccagtccatgcctcaggtgtcacatggcactgcgggcttcttggttgccaggaggcggaccacaggccatcttggggaggactttgtgttcaagtgcagaaagcagccaggattgccatccagggggaccttctatagccctggccaaaccttgcaggggtgtctggttgctctttgagccggcttggcctccctggcatgcacgggccccaggtgctggcacgctgctccgagtgtgcttgtcctgccttggctgccacctctgcgggggtgcgtctggagggggtggaccggccaccaaccttacccagtcaaggaagtggatggccatgttcccacagcctgagtggctgccacctgatggctgatggagcaaaggccttaggaaaagcagatggcccttggccctacctttttgttagaagaactgatgttccatgtcctgcagcgagtgaggttggtggctgtgcccccagctcctggcgcgccctcgcagaggtgactggttgctctttgggccctcttggccttgcccagcatgcacaagcctcagtgctactactgtgctacaaatggagccatataggggaaacgagcagccatctcaggagcaaggtgtatgctgcctttgggggctccagtccttgcctcaagggtcttatgtcactgtgggcttcttggttgtcaagaggcagaccataggccgtcttgagagggactttatgttcaagtgcagaaagcagccaggattgccaccctcgggactctgccttctgtggccctggccaaacttagaatttggccgtagacaggacaggctcacttggagtagcgtgtccgtagctggggtctgtgcatgccgggcaaggccgggctggctcggggagcaaccagccacctctgcgggggtgcgcctggagcaggtggagcagccaccagctcacccactccaggaagccggggtagccaggttcccaaggcctgagtgggtgccacctaatggctgaagaaacagaggccttgggaaaaccagatggcactgtggccctacctttatggtagaagagctgatttagcctgactggcagcgtgtggggttggtggctggtctgcctgctgctggcgcatccgtgcaaggatggctggttgccctttgagccagcttgcccttgcccggcatgcgcaagcctcagtgcaacaactgtgctgcaaatggggccatatagaggaaaggagcagctggctctggagcatggtgtgcactccctttgggccttcagtccatgtctcatgggtcgtatgacactgcgggcttgttggttgccaagaggcagaccacaggtcatcttgaggaggactttatgttccagtccagaaagcagccagtggtaccacccaggggacttgtgcttctgtgcccaggccagacgtagaatttgacaaagtcaggacggtctcagtcagagcggcgtgtcggtccccggggcctgtgcatgccgggcagggccgggctggcttggggagcaagcagccacctctgttaagggtgtgcctggagcaggtggagcagccaccaacctcacgcactgaaagaagcagggatggccaggttccaacatcctgagtggctgccacctgatggctgatggagcagaggcctgaggaaaagcagatggcactgctttgtagtgctgttctttgtctctcttgatctttttcagttaatgtctgttttatcagagactaggattgcaaaccctgctcttttttgctttccatttgcttggtaaatattcctccatccctttattttaagcctatgtgtgtctttgcacatgagatgggtctcctgaatacaggacaacaatgggtctttactctttatccaacttgccagtctgtgtcttttaactggggcatttagcccatttacatttaagtttagtattgttacatgtgaaatttatcctgtcatgatgttgctagctttttatttttcccattagtttgcagtttctttatagtgtcaatggtctttacaattcgatatgtttttgtagtggctggtactggtttttcctttctacgtttagtgtctccttcaggagctcttgtaacacaagaatgtggatttatttcttgtaaggtaaatatgtggatttatttcttgggactgtattctatggcctttaccccaagaatcattactttttaaaatgcaattcaaattagcataaaacatttacagcctatggaaaggcttgtggcattagaatccttatttataggattattttgtgtttttttgagatatggtctttgtcatcgaggcagaagtgccgtggtttgatcataattcaccacagccctgaactcttgagtccaagccatccttttgccttaatctcccaaccagttggatctgcaggcataaggcatcatgcgtggctaattttttcacgttttttttttttttttgtcgagattatggtgtcactgtgttgctctggctgatctcaaatgtttgacctcaagggatctttctgccacggcctcctaaagtgctaggattatatgcatgatacaccatgcctattgtagagtattacattattttcaaagtcttattgtaagagccatttattgcctttggcctaaataactcaatataatatctctgaaacttttttttgacaaattttggggcgtgatgatgagagaagggggtttgaaactttctaataagagttaacttagagccatttaagaaaggaaaaaacacaaattatcagaaaaacaacagtaagatcaagtgcaaaagttctgtggcaaagatgatgagagtaaagaatatatgtttgtgactcatggtggcttttactttgttcttgaatttctgagtacgggttaacatttaaagaatctacattatagataacattttattgcaagtaaatgtatttcaaaatttgttattggttttgtatgagattattctcagcctacttcattatcaagctatattattttattaatgtagttcgatgatcttacagcaaagctgaaagctgtatcttcaaaatatgtctatttgactaaaaagttattcaacaggagttattatctataaaaaaaatacaacaggaatataaaaaacttgaggataaaaagatgttggaaaaagtaatattaaatcttaaaaaacatatggaaactacacaatggtgaagacacattggtgaagtacaaaaatataaattggatctagaagaaagggcaatgcaggcaatagaaaaattagtagaaatccctttaaaggttagtttgtaaaatcaggtaagtttatttataatttgctttcatttatttcactgcaaattatattttggatatgtatatatattgtgcttcctctgcctgtcttacagcaatttgccttgcagagttctaggaaaaaggtggcatgtgtttttactttcaaaatatttaaatttccatcattataacaaaatcaatttttcagagtaatgattctcactgtggagtcatttgattattaagacccgttggcataagattacatcctctgactataaaaatcctggaagaaaacctaggaaatattcgtctggacattgcacttggcaatgaatttatgggtaaccactgatccacttccagtcactatccatgagtttttatttccagatacatgaaatcatatgagttgaaactttcttttgattgagcagtttggaaaccgtctttttgtagaatctgcaagtggatatttggaaccctttgaggcctatgctgaaaaaagaaatatcttcactacatgatgaccaccagcagcagctggggaaaccagcaccctgtggaattccatacggtgcatagaatacatcctcccttcagtcggcttgggtcaacttaggtcatgggccacctggctgatagcagtttccacagaaatgcttcaagatgaaagtggatgaccgggccaccctccaccactgccctgtaagaccatgggacacacaggccaccagttcttttcatgtggtcatcccctgttagatgggagaaaatacacctgcctcatttttgtaccttctgtgtgaacattccacggcagactgtcgctaaatgtggatgaagaattgaatgaatgaatgaatatgagagaaaatgaataaatggttcagatcctgggctggaaggctgtgtatgaggatggtgggtagaggagggtctgtttttcttgcctttaagtcactaattgtcactttggggcaggagcacaggctttgaatgcagaccgactggactttaattctggctttactagttgtgattgtgtgaccttgtgaaagttacttaaaccctctgtgcctgtttctttatctgtaaaatggagataataagatgtcaaaggactgtggtaagaattaaatgctttaaaaaaaaaaaaaaaaaa

SEQ ID NO: 474 - DNA, 1594 bp, Homo sapiens
atttatggatcattaatgcctctttagtagtttagagaaaacgtcaaaagaaatggccccagaataagcttcttgatttgtaaaattctatgtcattggctcaaatttgtatagtatctcaaaatataaatatatagacatctcagataatatatttgaaatagcaaattcctgttagaaaataatagtacttaactagatgagaataacaggtcgccattatttgaattgtctcctattcgtttttcatttgttgtgttactcatgttttacttatgagggatatatataacttccactgttttcagaattattgtatgcagtcagtatgagaatgcaatttaagtttccttgatgctttttcacacttctattactagaaataagaatacagtaatattggcaaagaaaattgaccagttcaataaaattttttagtaaatctgattgaaaataaacattgcttatggctttcttacatcaatattgttatgtcctagacaccttatctgaaattacggcttcaaaattctaattatgtgcaaatgtgtaaaatatcaatactttatgttcaagctggggcctcttcaggcgtcctgggctgagagagaaagatgctagctccgcaagccggagagggaacaccgccacattgttacacggacacaccgccacgtggacacatgaccagactcacatgtacagacacacggagacattaccacatggagacaccgtcacacagtcacacggacacactggcatagtcacatggacggacacacagacatatggagaaatcacatggacacaccaccacactatcacagggacacagacacacggagacatcaccacatggacacactgtcacactaccacagggacacgagacatcacactgtcacatggacacaccatcacacacatgaacacaccgacacactgccatatggacactggcacacacactgccacactgtcacatggacacacctccacaccatcacaccaccacacacactgcctgtggacacaaggacacacagacactgtcacacagatacacaaaacactgtcacacggagacatcaccatgcagatacaccaccactctggtgccgtctgaattaccctgctggggggacagcagtggcatactcatgcctaagtgactggctttcaccccagtagtgattgccctccatcaacactgcccaccccaggttggggctaccccagcccatctttacaaaacagggcaaggtgaactaatggagtgggtggaggagttggaagaaatcccagcgtcagtcaccgggatagaattcccaaggaaccctctttttggaggatggtttccatttctggaggcgatctgccgacagggtgaatgccttcttgcttgtcttctggggaatcagagagagtccgttttgtggtgggaagagtgtggctgtgtactttgaactcctgtaaattctctgactcatgtccacaaaaccaacagttttgtgaatgtgtctggaggcaagggaagggccactcaggatctatgttgaagggaagaggcctggggctggagtattcgctt

SEQ ID NO: 475 - DNA, 2414 bp, Homo sapiens
  unsure (33): n=A,T,C or G
cccaacacaatggctttataagaatgcttcacntgtgaaaaacaaatatcaaagtcttcttgtagattatttttaaggacaaatctttattccatgtttaatttatttagctttccctgtagctaatatttcatgctgaacacattttaaatgctgtaaatgtagataatgtaatttatgtatcattaatgcctctttagtagtttagagaaaacgtcaaaagaaatggccccagaataagcttcttgatttgtaaaattctatgtcattggctcaaatttgtatagtatctcaaaatataaatatatagacatctcagataatatatttgaaatagcaaattcctgttagaaaataatagtacttaactagatgagaataacaggtcgccattatttgaattgtctcctattcgtttttcatttgttgtgttactcatgttttacttatggggggatatatataacttccgctgttttcagaagtattgtatgcagtcagtatgagaatgcaatttaagtttccttgatgctttttcacacttctattactagaaataagaatacagtaatattggcaaagaaaattgaccagttcaataaaattttttagtaaatctgattgaaaataaacattgcttatggctttcttacatcaatattgttatgtcctagacaccttatctgaaattacggcttcaaaattctaattatgtgcaaatgtgtaaaatatcaatactttatgttcaagctggggcctcttcaggcgtcctgggctgagagagaaagatgctagctccgcaagccggggagggaacaccgccacattgttacatggacacaccgccacgtggacacatgaccagactcacatgtacagacacacggagacattaccacatggagacaccgtcacacagtcacacgagcacactggcatagtcacatggacggacacacagacatatggagaaatcacactgacacaccaccacactatcacagggacacagacacacggagacatcaccacatggacacactgtcacactaccacagggacacgagacatcacactgtcacatggacacaccatcacacacatgaacacaccgacacactgccatatggacactgccacacacactgccacactgtcacatggacacacctccataccatcacaccaccacacacactgccatgtggacacaaggacacacagacactgtcacacagatacacaaaacactgtcacacggagacatcaccatgcagatacaccaccacatggacatagcaccagacactctgccacacagatacaccaccacacagaaatgcggacacactgccacacagacaccaccacatcgttgccacactttcatgtgtcagctggcggtgtgggccccacgactctgggctctaatcgagaaattacttggacatatagtgaaggcaaaatttttttttattttctgggtaaccaagcgcgactctgtctcaaaaaaagaaaaaaaaagcaatatactgtgtaatcgttgacagcataattcactattatgtagatcggagagcagaggattctgaatgcatgaacatatcattaacatttcaatacattactcataattactgatgaactaaagagaaaccaagaaattatggtgatagttatattgacctggagaaatgtagacacaaaagaaccgtaagatgagaaatgtgttaacacagtctataagggcatgcaagaataaaaataggggagaaaacaggagagtttttcaagagctttctggtcatgtaagtcaacttgtatcggttaatttttaaaaggtttatttacatgcaataaactgcacatacttcaattgtacattttggtaattcttggcatttgtagctctataaaaccagcaacatattaaaatagcaaacatatccattacctttaccaccaaagttttcttgtgttttttctactcactttttcctgcctatccccccatctcttccacaggtaaccactgatccacttccagtcactatccatgagtttttatttccaaatacatgaaatcatatgaatttctggtttttcctgttggagcccaaggagcaagggcagaatgaggaacatgatgtttcttwccgacagttactcatgacgtctccatccaggactgaggggggcatccttctccatctaggactgggggcatccttctccatccagtattgggggtcatccttctccatccagtattgggggtcatcctcctccatccaggacctgaggggtgtccttttctgcgcttccttggatggcagtctttcccttcatgtttatagtracttaccattaaatcactgtgccgttttttcctaaaataaaaaaaaaaaaaaaaa

SEQ ID NO: 476 - DNA, 3434 bp, Homo sapiens
ctgtgctgcaaatggggccatatagaggaaaggagcagctggctctggagcatggtgtgcactccctttgggccttcagtccatgtctcatgggtcgtatgacactgcgggcttgttggttgccaagaggcagaccacaggtcatcttgaggaggactttatgttccagtccagaaagcagccagtggtaccacccaggggacttgtgcttctgtggcccaggccagacgtagaatttgacaaagtcaggacggtctcagtcagagcagcatgtcggtccccggggcctgtgcatgccgggcagggccaggctggcttaaggagcaagcagccacctctgttaggggtgtgcctggagcaggtggagcagccaccaacctcacgcactgaaagaagcagggatggccaggttccaacatcctgagtggctgccacctgatggctgatggagcagaggcctgaggaaaagcagatggcactgctttgtagtgctgttctttgtctctcttgatctttttcagttaatgtctgttttatcagagactaggattgcaaaccctgctcttttttgctttccatttgcttggtaaatattcctccatccctttattttaagcctatgtgtgtctttgcacatgagatgggtctcctgaatacaggacaacaatgggtctttactctttatccaacttgccagtctgtgtcttttaactggggcatttagcccatttacatttaagtttagtatttgttacatgtgaaatttatcctgtcatgatgttgctagctttttatttttcccattagtttgcagtttctttatagtgtcaatggtctttacaattcgatatgtttttgtagtggctggtactggtttttcctttctacgtttagtgtctccttcaggagctcttgtaacacaagaatgtggatttatttcttgtaaggtaaatatgtggatttattctgggactgtattctatggcctttaccccaagaatcattactttttaaaatgcaattcaaattagcataaaacatttacagcctatggaaaggcttgtggcattagaatccttatttataggattattttgtgtttttttgagatatggtctttgtcatcgaggcagaagtgccgtggtttgatcataattcaccacagccctgaactcttgagtccaagccatccttttgccttaatctcccaaccagttggatctacaagcataaggcatcatgcgtggctaattttttcacgttttttttttttttgtcgagattatggtatcactgtgttgctctggctgatctcaaatgtttgacctcaagggatctttctgccacagcctcctaaagtgctaggattatatgcatgatacaccatgcctattgtagagtattacattattttcaaagtcttattgtaagagccatttattgcctttggcctaaataactcaatataatatctctgaaacttttttttgacaaattttggggcgtgatgatgagagaagggggtttgaaactttctaataagagttaacttagagccatttaagaaaggaaaaaacacaaattatcagaaaaacaacagtaagatcaagtgcaaaagttctgtggcaaagatgatgagagtaaagaatatatgtttgtgactcatggtggcttttactttgttcttgaatttctgagtacgggttaacatttaaagaatctacattatagataacattttattgcaagtaaatgtatttcaaaatttgttattggttttgtatgagattattctcagcctacttcattatcaagctatattattttattaatgtagttcgatgatcttacagcaaagctgaaagctgtatcttcaaaatatgtctatttgactaaaaagttattcaacaggagttattatctataaaaaaatacaacaggaatataaaaaacttgaggataaaaagatgttggaaaaagtaatattaaatcttaaaaaacatatggaaactacacaatggtgaagacacattggtgaagtacaaaaatataaattggatctagaagaaagggcaatgcaggcaatagaaaaattagtagaaatccctttaaaggttagtttgtaaaatcaggtaagtttatttataatttgctttcatttatttcactgcaaattatattttggatatgtatatatattgtgcttcctctgcctgtcttacagcaatttgccttgcagagttctaggaaaaaggtggcatgtgtttttactttcaaaatatttaaatttccatcattataacaaaatcaatttttcagagtaatgattctcactgtggagtcatttgattattaagacccgttggcataagattacatcctctgactataaaaatcctggaagaaaacctaggaaatattcgtctggacattgcacttggcaatgaatttatgggcgctttggaatcctgcagatataataatgataattaaacaaaacactcagagaaactgccaaccctaggatgaagtatattgttactgtgctttgggattaaaataagtaactacagtttatagaacttttatactgatacacagacactaaaaagggaaagggtttagatgagaagctctgctatgcaatcaagaatctcagccactcatttctgtaggggctgcaggagctccctgtaaagagaggttatggagtctgtagcttcaggtaagatacttaaaacccttcagagtttctccattttttcccatagtttccccaaaaaggttatgacactttataagaatgcttcacttgtgaaaaacaaatatcaaagtcttcttgtagattatttttaaggacaaatctttattccatgtttaatttatttagctttccctgtagctaatatttcatgctgaacacattttaaatgctgtaaatgtagataatgtaatttatgtatcattaatgcctctttagtagtttagagaaaacgtcaaaagaaatggccccagaataagcttcttgatttgtaaaattctatgtcattggctcaaatttgtatagtatctcaaaatataaatatatagacatctcagataatatatttgaaatagcaaattcctgttagaaaataatagtacttaactagatgagaataacaggtcgccattatttgaattgtctcctattcgtttttcatttgttgtgttactcatgttttacttatggggggatatatataacttccgctgttttcagaagtattgtatgcagtcagtatgagaatgcaatttaagtttccttgatgctttttcacacttctattactagaaataagaatacagtaatattggcaaagaaaattgaccagttcaataaaattttttagtaaatctgattgaaaataaaaaaaaaaaaaaaaaaaaaaaaa

SEQ ID NO: 477 - protein, 140 aa, Homo sapiens
MDGHTDIWRNHMDTPPHYHRDTDTRRHHHMDTLSHYHRDTRHHTVTWTHHHTHEHTDTLPYGHWHTHCHTVTWTHLHTITPPHTLPVDTRTHRHCHTDTQNTVTRRHHHADTPPLWCRLNYPAGGTAVAYSCLSDWLSPQ

SEQ ID NO: 478 - protein, 143 aa, Homo sapiens
MYRHTETLPHGDTVTQSHGHTGIVTWTDTQTYGEITWTHHHTITGTQTHGDITTWTHCHTTTGTRDITLSHGHTITHMNTPTHCHMDTGTHTATLSHGHTSTPSHHHTHCLWTQGHTDTVTQIHKTLSHGDITMQIHHHSGAV

SEQ ID NO: 479 - protein, 222 aa, Homo sapiens
MYRHTETLPHGDTVTQSHEHTGIVTWTDTQTYGEITLTHHHTITGTQTHGDITTWTHCHTTTGTRDITLSHGHTITHMNTPTHCHMDTATHTATLSHGHTSIPSHHHTHCHVDTRTHRHCHTDTQNTVTRRHHHADTPPHGHSTRHSATQIHHHTEMRTHCHTDTTTSLPHFHVSAGGVGPTTLGSNREITWTYSEGKIFFYFLGNQARLCLKKRKKKQYTV

SEQ ID NO: 480 - protein, 144 aa, Homo sapiens [sequence omitted]

SEQ ID NO: 481 - protein, 167 aa, Homo sapiens
MHGPQVLARCSECACPALAATSAGVRLEGVDRPPTLPSQGSGWPCSHSLSGCHLMADGAKALGKADGPWPYLFVRRTDVPCPAASEVGGCAPSSWRALAEVTGCSLGPLGLAQHAQASVLLLCYKWSHIGETSSHLRSKVYAAFGGSSPCLKGLMSLWASWLSRGRP

SEQ ID NO: 482 - protein, 143 aa, Homo sapiens [sequence omitted]

SEQ ID NO: 483 - protein, 143 aa, Homo sapiens
METQRGNKQRAQEQGVCCLWGSSPCLGSYGTAGFLVAKRRTTGLLEEDFTFKCRKQPKLPSMRLSLLWPWRDLKFVPRQDKLTRSSVSVAGAYACRAGPGWLKEQPATSARVRLVQAEHPPPHPLEEVGMARFPQPECLPPYC

SEQ ID NO: 484 - protein, 30 aa, Homo Sapien
TAASDNFQLSQGGQGFAIPIGQAMAIAGQI

SEQ ID NO: 485 - DNA, 31 bp, Artificial Sequence
  Made in a lab
gggaagcttatcacctatgtgccgcctctgc

SEQ ID NO: 486 - DNA, 27 bp, Artificial Sequence
  Made in a lab
gcgaattctcacgctgagtatttggcc

SEQ ID NO: 487 - DNA, 36 bp, Artificial Sequence
  Made in a lab
cccgaattcttagctgcccatccgaacgccttcatc

SEQ ID NO: 488 - DNA, 33 bp, Artificial Sequence
  Made in a lab
gggaagcttcttccccggctgcaccagctgtgc

SEQ ID NO: 489 - protein, 19 aa, Artificial Sequence
  Made in a lab
MDRLVQRFGTRAVYLASVA

SEQ ID NO: 490 - protein, 20 aa, Artificial Sequence
  Made in a lab
YLASVAAFPVAAGATCLSHS

SEQ ID NO: 491 - protein, 20 aa, Artificial Sequence
  Made in a lab
TCLSHSVAVVTASAALTGFT

SEQ ID NO: 492 - protein, 20 aa, Artificial Sequence
  Made in a lab
ALTGFTFSALQILPYTLASL

SEQ ID NO: 493 - protein, 20 aa, Artificial Sequence
  Made in a lab
YTLASLYHREKQVFLPKYRG

SEQ ID NO: 494 - protein, 20 aa, Artificial Sequence
  Made in a lab
LPKYRGDTGGASSEDSLMIS

SEQ ID NO: 495 - protein, 20 aa, Artificial Sequence
  Made in a lab
DSLMTSFLPGPKPGAPFPNG

SEQ ID NO: 496 - protein, 21 aa, Artificial Sequence
  Made in a lab
APFPNGHVGAGGSGLLPPPPA

SEQ ID NO: 497 - protein, 20 aa, Artificial Sequence
  Made in a lab
LLPPPPALCGASACDVSVRV

SEQ ID NO: 498 - protein, 20 aa, Artificial Sequence
  Made in a lab
DVSVRVVVGEPTEARVVPGR

SEQ ID NO: 499 - protein, 20 aa, Artificial Sequence
  Made in a lab
RVVPGRGICLDLAILDSAFL

SEQ ID NO: 500 - protein, 20 aa, Artificial Sequence
  Made in a lab
LDSAFLLSQVAPSLFMGSIV

SEQ ID NO: 501 - protein, 20 aa, Artificial Sequence
  Made in a lab
FMGSIVQLSQSVTAYMVSAA

SEQ ID NO: 502 - DNA, 414 bp, Homo Sapien
  misc_feature (1)...(414): n=A,T,C or G
caccatggagacaggcctgcgctggcttttcctggtcgctgtgctcaaaggtgtccaatgtcagtcggtggaggagtccgggggtcgcctggtcacgcctgggacacctttgacantcacctgtagagtttttggaatngacctcagtagcaatgcaatgagctgggtccgccaggctccagggaaggggctggaatggatcggagccattgataattgtccacantacgcgacctgggcgaaaggccgattnatnatttccaaaacctngaccacggtggatttgaaaatgaccagtccgacaaccgaggacacggccacctatttttgtggcagaatgaatactggtaatagtggttggaagaatatttggggcccaggcaccctggtcaccgtntcctcagggcaacctaa

SEQ ID NO: 503 - DNA, 379 bp, Homo Sapien
  misc_feature (1)...(379): n=A,T,C or G
atncgatggtgcttggtcaaaggtgtccagtgtcagtcggtggaggagtccgggggtcgcctggtcacgcctgggacacccctgacactcacctgcaccgtntctggattngacatcagtagctatggagtgagctgggtccgccaggctccagggaaggggctggnatacatcggatcattagtagtagtggtacattttacgcgagctgggcgaaaggccgattcaccatttccaaaacctngaccacggtggatttgaaaatcaccagtttgacaaccgaggacacggccacctatttntgtgccagaggggggtttaattataaagacatttggggcccaggcaccctggtcaccgtntccttagggcaacctaa

SEQ ID NO: 504 - protein, 19 aa, Artificial Sequence
  Made in a lab
GFTNYTDFEDSPYFKENSA

SEQ ID NO: 505 - protein, 20 aa, Artificial Sequence
  Made in a lab
KENSAFPPFCCNDNVTNTAN

SEQ ID NO: 506 - DNA, 407 bp, Homo Sapien
atggagacaggcctgcgctggcttctcctggtcgctgcgctcaaaggtgtccagtgtcagtcgctggaggagtccgggggtcgcctggtcacgcctgggacacccctgacactcacctgcaccgtctctggattctccctcagtagcaatgcaatgatctgggtccgccaggctccagggaaggggctggaatacatcggatacattagttatggtggtagcgcatactacgcgagctgggtgaaaggccgattcaccatctccaaaacctcgaccacggtggatctgagaatgaccagtctgacaaccgaggacacggccacctatttctgtgccagaaatagtgattttagtggtatgttgtggggcccaggcaccctggtcaccgtctcctcagggcaacctaa

SEQ ID NO: 507 - DNA, 422 bp, Homo Sapien
atggagacaggcctgcgctggcttctcctggtcgctgtgctcaaaggtgtccagtgtcagtcggtggaggagtccgggggtcgcctggtcacgcctgggacacccctgacactcacctgtacagtctctggattctccctcagcaactacgacctgaactgggtccgccaggctccagggaaggggctggaatggatcgggatcattaattatgttggtaggacggactacgcgaactgggcaaaaggccggttcaccatctccaaaacctcgaccaccgtggatctcaagatcgccagtccgacaaccgaggacacggccacctatttctgtgccagagggtggaagtgcgatgagtctggtccgtgcttgcgcatctggggcccaggcaccctggtcaccgtctccttagggcaacctaa

SEQ ID NO: 508 - DNA, 411 bp, Homo Sapien
  misc_feature (1)...(411): n=A,T,C or G
atggagacaggcctcgctggcttctcctggtcgctgtgctcaaaggtgtccagtgtcagtcggtggaggagtccgggggtcgcctggtcacgcctgggacacccctgacactcacctgcacagtctctggaatcgacctcagtagctactgcatgagctgggtccgccaggctccagggaaggggctggaatggatcggaatcattggtactcctggtgacacatactacgcgaggtgggcgaaaggccgattcaccatctccaaaacctcgaccacggtgcatntgaaaatcnccagtccgacaaccgaggacacggccacctatttctgtgccagagatcttcgggatggtagtagtactggttattataaaatctggggcccaggcaccctggtcaccgtctccttgg

SEQ ID NO: 509 - protein, 15 aa, Artificial Sequence
  Made in a lab
LCKFTEWIEKTVQAS

SEQ ID NO: 510 - protein, 15 aa, Artificial Sequence
  Made in a lab
PEYNRPLLANDLMLI

SEQ ID NO: 511 - protein, 15 aa, Artificial Sequence
  Made in a lab
YHPSMFCAGGGQDQK

SEQ ID NO: 512 - protein, 15 aa, Artificial Sequence
  Made in a lab
DSGGPLICNGYLQGL

SEQ ID NO: 513 - protein, 15 aa, Artificial Sequence
  Made in a lab
APCGQVGVPBVYTNL

SEQ ID NO: 514 - protein, 15 aa, Artificial Sequence
  Made in a lab
LCKFTEWIEKTVQAS

SEQ ID NO: 515 - protein, 15 aa, Artificial Sequence
  Made in a lab
MVEASLSVRHPEYNR

SEQ ID NO: 516 - protein, 15 aa, Artificial Sequence
  Made in a lab
VSESDTIRSISIASQ

SEQ ID NO: 517 - protein, 15 aa, Artificial Sequence
  Made in a lab
EVCSKLYDPLYHPSM

SEQ ID NO: 518 - protein, 15 aa, Artificial Sequence
  Made in a lab
RAEPGTEARRHYDEG

SEQ ID NO: 519 - protein, 17 aa, Artificial Sequence
  Made in a lab
RAEPGTEARRNYDEGCG

SEQ ID NO: 520 - protein, 25 aa, Artificial Sequence
  Made in a lab
VGEGLYQGVPRAEPGTEARRHYDEG

SEQ ID NO: 521 - protein, 21 aa, Artificial Sequence
  Made in a lab
APFPNGHVGAGGSGLLPPPPA

SEQ ID NO: 522 - protein, 20 aa, Artificial Sequence
  Made in a lab
LLVVPAIKKDYGSQEDFTQV

SEQ ID NO: 523 - protein, 254 aa, Artificial Sequence
  Made in a lab
  VARIANT (1)...(254): Xaa = any amino acid
MATAGNPWGWFLGYLILGVAGSLVSGSCSQIINGEDCSPHSQPWQAALVMENELFCSGVLVHPQWVLSATHCFQNSYTIGLGLHSLEADQEPGSQMVEASLSVRHPEYNRPLLANDLMLIKLDESVSESDTIRSISIASQCPTAGNSCLVSGWGLLANGRMPTVLQCVNVSVVSEEVCSKLYDPLYHPSMFCAGGGQXQXDSCNGDSGGPLICNGYLQGLVSFGKAPCGQVGVPGVYTNLCKFTEWIEKTVQAS

SEQ ID NO: 524 - DNA, 765 bp, Homo sapien
atggccacagcaggaaatccctggggctggttcctggggtacctcatccttggtgtcgcaggatcgctcgtctctggtagctgcagccaaatcataaacggcgaggactgcagcccgcactcgcagccctggcaggcggcactggtcatggaaaacgaattgttctgctcgggcgtcctggtgcatccgcagtgggtgctgtcagccgcacactgtttccagaactcctacaccatcgggctgggcctgcacagtcttgaggccgaccaagagccagggagccagatggtggaggccagcctctccgtacggcacccagagtacaacagacccttgctcgctaacgacctcatgctcatcaagttggacgaatccgtgtccgagtctgacaccatccggagcatcagcattgcttcgcagtgccctaccgcggggaactcttgcctcgtttctggctggggtctgctggcgaacggcagaatgcctaccgtgctgcagtgcgtgaacgtgtcggtggtgtctgaggaggtctgcagtaagctctatgacccgctgtaccaccccagcatgttctgcgccggcggagggcaagaccagaaggactcctgcaacggtgactctggggggcccctgatctgcaacgggtacttgcagggccttgtgtctttcggaaaagccccgtgtggccaagttggcgtgccaggtgtctacaccaacctctgcaaattcactgagtggatagagaaaaccgtccaggccagttaa

SEQ ID NO: 525 - protein, 254 aa, Homo sapien
MATAGNPWGWFLGYLILGVAGSLVSGSCSQIINGEDCSPHSQPWQAALVMENELFCSGVLVHPQWVLSAAHCFQNSYTIGLGLHSLEADQEPGSQMVEASLSVRHPEYNRPLLANDLMLIKLDESVSESDTIRSISIASQCPTAGNSCLVSGWGLLANGRMPTVLQCVNVSVVSEEVCSKLYDPLYHPSMFCAGGGQDQKDSCNGDSGGPLICNGYLQGLVSFGKAPCGQVGVPGVYTNLCKFTEWIEKTVQAS

SEQ ID NO: 526 - DNA, 963 bp, Homo sapiens
atgagttcctgcaacttcacacatgccacctttgtgcttattggtatcccaggattagagaaagcccatttctgggttggcttccccctcctttccatgtatgtagtggcaatgtttggaaactgcatcgtggtcttcatcgtaaggacggaacgcagcctgcacgctccgatgtacctctttctctgcatgcttgcagccattgacctggccttatccacatccaccatgcctaagatccttgcccttttctggtttgattcccgagagattagctttgaggcctgtcttacccagatgttctttattcatgccctctcagccattgaatccaccatcctgctggccatggcctttgaccgttatgtggccatctgccacccactgcgccatgctgcagtgctcaacaatacagtaacagcccagattggcatcgtggctgtggtccgcggatccctcttttttttcccactgcctctgctgatcaagcggctggccttctgccactccaatgtcctctcgcactcctattgtgtccaccaggatgtaatgaagttggcctatgcagacactttgcccaatgtggtatatggtcttactgccattctgctggtcatgggcgtggacgtaatgttcatctccttgtcctattttctgataatacgaacggttctgcaactgccttccaagtcagagcgggccaaggcctttggaacctgtgtgtcacacattggtgtggtactcgccttctatgtgccacttattggcctctcagttgtacaccgctttggaaacagccttcatcccattgtgcgtgttgtcatgggtgacatctacctgctgctgcctcctgtcatcaatcccatcatctatggtgccaaaaccaaacagatcagaacacgggtgctggctatgttcaagatcagctgtgacaaggacttgcaggctgtgggaggcaagtga

SEQ ID NO: 527 - protein, 320 aa, Homo sapiens
MSSCNFTHATFVLIGIPGLEKAHFWVGFPLLSMYVVAMFGNCIVVFIVRTERSLHAPMYLFLCMLAAIDLALSTSTMPKILALFWFDSREISFEACLTQMFFIHALSAIESTILLAMAFDRYVAICHPLRHAAVLNNTVTAQIGIVAVVRGSLFFFPLPLLIKRLAFCHSNVLSHSYCVHQDVMKLAYADTLPNVVYGLTAILLVMGVDVMFISLSYFLIIRTVLQLPSKSERAKAFGTCVSHIGVVLAFYVPLIGLSVVHRFGNSLHPIVRVVMGDIYLLLPPVINPIIYGAKTKQIRTRVLAMFKISCDKDLQAVGGK

SEQ ID NO: 528 - DNA, 20 bp, Homo Sapien
actatggtccagaggctgtg

SEQ ID NO: 529 - DNA, 20 bp, Homo Sapien
atcacctatgtgccgcctct

SEQ ID NO: 530 - DNA, 1852 bp, Homo sapiens
ggcacgagaattaaaaccctcagcaaaacaggcatagaagggacataccttaaagtaataaaaaccacctatgacaagcccacagccaacataatactaaatggggaaaagttagaagcatttcctctgagaactgcaacaataaatacaaggatgctggattttgtcaaatgccttttctgtgtctgttgagatgcttatgtgactttgcttttaattctgtttatgtgattatcacatttattgacttgcctgtgttagaccggaagagctggggtgtttctcaggagccaccgtgtgctgcggcagcttcgggataacttgaggctgcatcactggggaagaaacacaytcctgtccgtggcgctgatggctgaggacagagcttcagtgtggcttctctgcgactggcttcttcggggagttcttccttcatagttcatccatatggctccagaggaaaattatattattttgttatggatgaagagtattacgttgtgcagatatactgcagtgtcttcatctcttgatgtgtgattgggtaggttccaccatgttgccgcagatgacatgatttcagtacctgtgtctggctgaaaagtgtttgtttgtgaatggatattgtggtttctggatctcatcctctgtgggtggacagctttctccaccttgctggaagtgacctgctgtccagaagtttgatggctgaggagtataccatcgtgcatgcatctttcatttcctgcatttcttcctccctggatggacagggggagcggcaagagcaacgtgggcacttctggagaccacaacgactcctctgtgaagacgcttgggagcaagaggtgcaagtggtgctgccactgcttcccctgctgcagggggagcggcaagagcaacgtggtcgcttggggagactacgatgacagcgccttcatggatcccaggtaccacgtccatggagaagatctggacaagctccacagagctgcctggtggggtaaagtccccagaaaggatctcatcgtcatgctcagggacacggatgtgaacaagagggacaagcaaaagaggactgctctacatctggcctctgccaatgggaattcagaagtagtaaaactcgtgctggacagacgatgtcaacttaatgtccttgacaacaaaaagaggacagctctgacaaaggccgtacaatgccaggaagatgaatgtgcgttaatgttgctggaacatggcactgatccaaatattccagatgagtatggaaataccactctacactatgctgtctacaatgaagataaattaatggccaaagcactgctcttatacggtgctgatatcgaatcaaaaaacaagcatggcctcacaccactgctacttggtatacatgagcaaaaacagcaagtggtgaaatttttaatcaagaaaaaagcgaatttaaatgcgctggatagatatggaagaactgctctcatacttgctgtatgttgtggatcagcaagtatagtcagccctctacttgagcaaaatgttgatgtatcttctcaagatctggaaagacggccagagagtatgctgtttctagtcatcatcatgtaatttgccagttactttctgactacaaagaaaaacagatgttaaaaatctcttctgaaaacagcaatccagaacaagacttaaagctgacatcagaggaagagtcacaaaggcttaaaggaagtgaaaacagccagccagagctagaagatttatggctattgaagaagaatgaagaacacggaagtactcatgtgggattcccagaaaacctgactaacggtgccgctgctggcaatggtgatga

SEQ ID NO: 531 - DNA, 879 bp, Homo sapiens
atgcatctttcatttcctgcatttcttcctccctggatggacagggggagcggcaagagcaacgtgggcacttctggagaccacaacgactcctctgtgaagacgcttgggagcaagaggtgcaagtggtgctgccactgcttcccctgctgcagggggagcggcaagagcaacgtggtcgcttggggagactacgatgacagcgccttcatggatcccaggtaccacgtccatggagaagatctggacaagctccacagagctgcctggtggggtaaagtccccagaaaggatctcatcgtcatgctcagggacacggatgtgaacaagagggacaagcaaaagaggactgctctacatctggcctctgccaatgggaattcagaagtagtaaaactcgtgctggacagacgatgtcaacttaatgtccttgacaacaaaaagaggacagctctgacaaaggccgtacaatgccaggaagatgaatgtgcgttaatgttgctggaacatggcactgatccaaatattccagatgagtatggaaataccactctacactatgctgtctacaatgaagataaattaatggccaaagcactgctcttatacggtgctgatatcgaatcaaaaaacaagcatggcctcacaccactgctacttggtatacatgagcaaaaacagcaagtggtgaaatttttaatcaagaaaaaagcgaatttaaatgcgctggatagatatggaagaactgctctcatacttgctgtatgttgtggatcagcaagtatagtcagccctctacttgagcaaaatgttgatgtatcttctcaagatctggaaagacggccagagagtatgctgtttctagtcatcatcatgtaa

SEQ ID NO: 532 - protein, 292 aa, Homo sapiens
MHLSFPAFLPPWMDRGSGKSNVGTSGDHNDSSVKTLGSKRCKWCCHCFPCCRGSGKSNVVAWGDYDDSAFMDPRYHVHGEDLDKLHRAAWWGKVPRKDLIVMLRDTDVNKRDKQKRTALHLASANGNSEVVKLVLDRRCQLNVLDNKKRTALTKAVQCQEDECALMLLEHGTDPNIPDEYGNTTLHYAVYNEDKLMAKALLLYGADIESKNKHGLTPLLLGIHEQKQQVVKFLIKKKANLNALDRYGRTALILAVCCGSASIVSPLLEQNVDVSSQDLERRPESMLFLVIIM

SEQ ID NO: 533 - DNA, 801 bp, Homo sapiens
atgtacaagcttcagtgcaacaactgtgctacaaatggagccacagagaggaaacaagcagcaggctcaggagcagggtatgcgctgccttcggctctccaatccatgcctcagggctcctatgccactgcacgattcttggttgccaagaggccaaccacaggccatcttgagaaggagtttatgttccactgcagaaagcagccaggatcaccatccaggggacttggtcttctgtggccctggccagacatagaatttgtgccaaggcaggacaagctcactcagagcagcgtgttagtacctcaaatctgtgcgtgccagacaaggccaaactggctcaatgagcaaccagccacctctgcaggggtgcgtctggaggaggtggaccagccaccaaccttacccagtcaaggaagtggatggccatgttcccacagcctgagtggctgccacctgatggctgatatagcaaaggccttaggaaaagcagatggcccttggccctacctttttgttagaagaactgatgttccatgtcctgcagcgagtgaggttggtggctgtgcccccagctcctggcacaccctcgcagaggtgactggttgctctttgagccctcttagccttgcccagcatgcacaagcctcagtgctactactgtgctacaaatggagccatataggggaaacgagcagccatctcaggagcaaggtgtatgctgcctttgggggctccagtccttgcctcaagggtcttatgtcactgtgggcttcttggttgccaagaggcagaccatag

SEQ ID NO: 534 - protein, 266 aa, Homo sapiens [sequence omitted]

SEQ ID NO: 535 - DNA, 6082 bp, Homo sapiens
cctccactattacagcttataggaaattacaatccactttacaggcctcaaaggttcattctggccgagcggacaggcgtggcggccggagccccagcatccctgcttgaggtccaggagcggagcccgcggccactgccgcctgatcagcgcgaccccggcccgcgcccgccccgcccggcaagatgctgcccgtgtaccaggaggtgaagcccaacccgctgcaggacgcgaacctctgctcacgcgtgttcttctggtggctcaatcccttgtttaaaattggccataaacggagattagaggaagatgatatgtattcagtgctgccagaagaccgctcacagcaccttggagaggagttgcaagggttctgggataaagaagttttaagagctgagaatgacgcacagaagccttctttaacaagagcaatcataaagtgttactggaaatcttatttagttttgggaatttttacgttaattgaggaaagtgccaaagtaatccagcccatatttttgggaaaaattattaattattttgaaaattatgatcccatggattctgtggctttgaacacagcgtacgcctatgccacggtgctgactttttgcacgctcattttggctatactgcatcacttatatttttatcacgttcagtgtgctgggatgaggttacgagtagccatgtgccatatgatttatcggaaggcacttcgtcttagtaacatggccatggggaagacaaccacaggccagatagtcaatctgctgtccaatgatgtgaacaagtttgatcaggtgacagtgttcttacacttcctgtgggcaggaccactgcaggcgatcgcagtgactgccctactctggatggagataggaatatcgtgccttgctgggatggcagttctaatcattctcctgcccttgcaaagctgttttgggaagttgttctcatcactgaggagtaaaactgcaactttcacggatgccaggatcaggaccatgaatgaagttataactggtataaggataataaaaatgtacgcctgggaaaagtcattttcaaatcttattaccaatttgagaaagaaggagatttccaagattctgagaagttcctgcctcagggggatgaatttggcttcgtttttcagtgcaagcaaaatcatcgtgtttgtgaccttcaccacctacgtgctcctcggcagtgtgatcacagccagccgcgtgttcgtggcagtgacgctgtatggggctgtgcggctgacggttaccctcttcttcccctcagccattgagagggtgtcagaggcaatcgtcagcatccgaagaatccagacctttttgctacttgatgagatatcacagcgcaaccgtcagctgccgtcagatggtaaaaagatggtgcatgtgcaggattttactgctttttgggataaggcatcagagaccccaactctacaaggcctttcctttactgtcagacctggcgaattgttagctgtggtcggccccgtgggagcagggaagtcatcactgttaagtgccgtgctcggggaattggccccaagtcacgggctggtcagcgtgcatggaagaattgcctatgtgtctcagcagccctgggtgttctcgggaactctgaggagtaatattttatttgggaagaaatacgaaaaggaacgatatgaaaaagtcataaaggcttgtgctctgaaaaaggatttacagctgttggaggatggtgatctgactgtgataggagatcggggaaccacgctgagtggagggcagaaagcacgggtaaaccttgcaagagcagtgtatcaagatgctgacatctatctcctggacgatcctctcagtgcagtagatgcggaagttagcagacacttgttcgaactgtgtatttgtcaaattttgcatgagaagatcacaattttagtgactcatcagttgcagtacctcaaagctgcaagtcagattctgatattgaaagatggtaaaatggtgcagaaggggacttacactgagttcctaaaatctggtatagattttggctcccttttaaagaaggataatgaggaaagtgaacaacctccagttccaggaactcccacactaaggaatcgtaccttctcagagtcttcggtttggtctcaacaatcttctagaccctccttgaaagatggtgctctggagagccaagatacagagaatgtcccagttacactatcagaggagaaccgttctgaaggaaaagttggttttcaggcctataagaattacttcagagctggtgctcactggattgtcttcattttccttattctcctaaacactgcagctcaggttgcctatgtgcttcaagattggtggctttcatactgggcaaacaaacaaagtatgctaaatgtcactgtaaatggaggaggaaatgtaaccgagaagctagatcttaactggtacttaggaatttattcaggtttaactgtagctaccgttctttttggcatagcaagatctctattggtattctacgtccttgttaactcttcacaaactttgcacaacaaaatgtttgagtcaattctgaaagctccggtattattctttgatagaaatccaataggaagaattttaaatcgtttctccaaagacattggacacttggatgatttgctgccgctgacgtttttagatttcatccagacattgctacaagtggttggtgtggtctctgtggctgtggccgtgattccttggatcgcaatacccttggttccccttggaatcattttcatttttcttcggcgatattttttggaaacgtcaagagatgtgaagcgcctggaatctacaactcggagtccagtgttttcccacttgtcatcttctctccaggggctctggaccatccgggcatacaaagcagaagagaggtgtcaggaactgtttgatgcacaccaggatttacattcagaggcttggttcttgtttttgacaacgtcccgctggttcgccgtccgtctggatgccatctgtgccatgtttgtcatcatcgttgcctttgggtccctgattctggcaaaaactctggatgccgggcaggttggtttggcactgtcctatgccctcacgctcatggggatgtttcagtggtgtgttcgacaaagtgctgaagttgagaatatgatgatctcagtagaaagggtcattgaatacacagaccttgaaaaagaagcaccttgggaatatcagaaacgcccaccaccagcctggccccatgaaggagtgataatctttgacaatgtgaacttcatgtacagtccaggtgggcctctggtactgaagcatctgacagcactcattaaatcacaagaaaaggttggcattgtgggaagaaccggagctggaaaaagttccctcatctcagccctttttagattgtcagaacccgaaggtaaaatttggattgataagatcttgacaactgaaattggacttcacgatttaaggaagaaaatgtcaatcatacctcaggaacctgttttgttcactggaacaatgaggaaaaacctggatccctttaatgagcacacggatgaggaactgtggaatgccttacaagaggtacaacttaaagaaaccattgaagatcttcctggtaaaatggatactgaattagcagaatcaggatccaattttagtgttggacaaagacaactggtgtgccttgccagggcaattctcaggaaaaatcagatattgattattgatgaagcgacggcaaatgtggatccaagaactgatgagttaatacaaaaaaaatccgggagaaatttgcccactgcaccgtgctaaccattgcacacagattgaacaccattattgacagcgacaagataatggttttagattcaggaagactgaaagaatatgatgagccgtatgttttgctgcaaaataaagagagcctattttacaagatggtgcaacaactgggcaaggcagaagccgctgccctcactgaaacagcaaaacaggtatacttcaaaagaaattatccacatattggtcacactgaccacatggttacaaacacttccaatggacagccctcgaccttaactattttcgagacagcactgtgaatccaaccaaaatgtcaagtccgttccgaaggcatttgccactagtttttggactatgtaaaccacattgtacttttttttactttggcaacaaatatttatacatacaagatgctagttcatttgaatatttctcccaacttatccaaggatctccagctctaacaaaatggtttatttttatttaaatgtcaatagttgttttttaaaatccaaatcagaggtgcaggccaccagttaaatgccgtctatcaggttttgtgccttaagagactacagagtcaaagctcatttttaaaggagtaggacagagttgtcacaggtttttgttgttgtttttattgcccccaaaattacatgttaatttccatttatatcagggattctatttacttgaagactgtgaagttgccattttgtctcattgttttctttgacataactaggatccattatttcccctgaaggcttcttgttagaaaatagtacagttacaaccaataggaacaacaaaaagaaaaagtttgtgacattgtagtagggagtgtgtaccccttactccccatcaaaaaaaaaaatggatacatggttaaaggatagaagggcaatattttatcatatgttctaaaagagaaggaagagaaaatactactttctcaaaatggaagcccttaaaggtgctttgatactgaaggacacaaatgtgaccgtccatcctcctttagagttgcatgacttggacacggtaactgttgcagttttagactcagcattgtgacacttcccaagaaggccaaacctctaaccgacattcctgaaatacgtggcattattcttttttggatttctcatttatggaaggctaaccctctgttgactgtaagccttttggtttgggctgtattgaaatcctttctaaattgcatgaataggctctgctaacgtgatgagacaaactgaaaattattgcaagcattgactataattatgcagtacgttctcaggatgcatccaggggttcattttcatgagcctgtccaggttagtttactcctgaccactaatagcattgtcatttgggctttctgttgaatgaatcaacaaaccacaatacttcctgggaccttttgtactttatttgaactatgagtctttaatttttcctgatgatggtggctgtaatatgttgagttcagtttactaaaggttttactattatggtttgaagtggagtctcatgacctctcagaataaggtgtcacctccctgaaattgcatatatgtatatagacatgcacacgtgtgcatttgtttgtatacatatatttgtccttcgtatagcaagttttttgctcatcagcagagagcaacagatgttttattgagtgaagccttaaaaagcacacaccacacacagctaactgccaaaatacattgaccgtagtagctgttcaactcctagtacttagaaatacacgtatggttaatgttcagtccaacaaaccacacacagtaaatgtttattaatagtcatggttcgtattttaggtgactgaaattgcaacagtgatcataatgaggtttgttaaaatgatagctatattcaaaatgtctatatgtttatttggacttttgaggttaaagacagtcatataaacgtcctgtttctgttttaatgttatcatagaattttttaatgaaactaaattcaattgaaataaatgatagttttcatctccaaaaaaaaaaaaaaaaagggcggccgctcgagtctagagggcccgtttaaacccgctgatcagcctcgactgtgccttctagttgccagccatctgttgtttgcccctcccccgtgccttccttgaccctggaaggtgccactcccactgtcctttcctaataaaatgaggaaattgcatc

SEQ ID NO: 536 - DNA, 6140 bp, Homo sapiens
  misc_feature (1)...(6140): n=A,T,C or G
cagtggcgcagtctcagctcactgcagcctccacctcctgtgttcaagcagtcctcctgcctcagccaccagactagcaggtctcccccgcctctttcttggaaggacacttgccattggatttaggacccacttggataatccaggatgatgtcttcactccaacatcctcagtttaattccatgtgcaaatacccttttcccaaataacattcaattctttaccaggaaaggtggctcaatcccttgtttaaaattggccataaacggagattagaggaagatgatatgtattcagtgctgccagaagaccgctcacagcaccttggagaggagttgcaagggttctgggataaagaagttttaagagctgagaatgacgcacagaagccttctttaacaagagcaatcataaagtgttactggaaatcttatttagttttgggaatttttacgttaattgaggaaagtgccaaagtaatccagcccatatttttgggaaaaattattaattattttgaaaattatgatcccatggattctgtggctttgaacacagcgtacgcctatgccacggtgctgactttttgcacgctcattttggctatactgcatcacttatatttttatcacgttcagtgtgctgggatgaggttacgagtagccatgtgccatatgatttatcggaaggcacttcgtcttagtaacatggccatggggaagacaaccacaggccagatagtcaatctgctgtccaatgatgtgaacaagtttgatcaggtgacagtgttcttacacttcctgtgggcaggaccactgcaggcgatcgcagtgactgccctactctggatggagataggaatatcgtgccttgctgggatggcagttctaatcattctcctgcccttgcaaagctgttttgggaagttgttctcatcactgaggagtaaaactgcaactttcacggatgccaggatcaggaccatgaatgaagttataactggtataaggataataaaaatgtacgcctgggaaaagtcattttcaaatcttattaccaatttgagaaagaaggagatttccaagattctgagaagttcctgcctcagggggatgaatttggcttcgtttttcagtgcaagcaaaatcatcgtgtttgtgaccttcaccacctacgtgctcctcggcagtgtgatcacagccagccgcgtgttcgtggcagtgacgctgtatggggctgtgcggctgacggttaccctcttcttcccctcagccattgagagggtgtcagaggcaatcgtcagcatccgaagaatccagacctttttgctacttgatgagatatcacagcgcaaccgtcagctgccgtcagatggtaaaaagatggtgcatgtgcaggattttactgctttttgggataaggcatcagagaccccaactctacaaggcctttcctttactgtcagacctggcgaattgttagctgtggtcggccccgtgggagcagggaagtcatcactgttaagtgccgtgctcggggaattggccccaagtcacgggctggtcagcgtgcatggaagaattgcctatgtgtctcagcagccctgggtgttctcgggaactctgaggagtaatattttatttgggaagaaatacgaaaaggaacgatatgaaaaagtcataaaggcttgtgctctgaaaaaggatttacagctgttggaggatggtgatctgactgtgataggagatcggggaaccacgctgagtggagggcagaaagcacgggtaaaccttgcaagagcagtgtatcaagatgctgacatctatctcctggacgatcctctcagtgcagtagatgcggaagttagcagacacttgttcgaactgtgtatttgtcaaattttgcatgagaagatcacaattttagtgactcatcagttgcagtacctcaaagctgcaagtcagattctgatattgaaagatggtaaaatggtgcagaaggggacttacactgagttcctaaaatctggtatagattttggctcccttttaaagaaggataatgaggaaagtgaacaacctccagttccaggaactcccacactaaggaatcgtaccttctcagagtcttcggtttggtctcaacaatcttctagaccctccttgaaagatggtgctctggagagccaagatacagagaatgtcccagttacactatcagaggagaaccgttctgaaggaaaagttggttttcaggcctataagaattacttcagagctggtgctcactggattgtcttcattttccttattctcctaaacactgcagctcaggttgcctatgtgcttcaagattggtggctttcatactgggcaaacaaacaaagtatgctaaatgtcactgtaaatggaggaggaaatgtaaccgagaagctagatcttaactggtacttaggaatttattcaggtttaactgtagctaccgttctttttggcatagcaagatctctattggtattctacgtccttgttaactcttcacaaactttgcacaacaaaatgtttgagtcaattctgaaagctccggtattattctttgatagaaatccaataggaagaattttaaatcgtttctccaaagacattggacacttggatgatttgctgccgctgacgtttttagatttcatccagacattgctacaagtggttggtgtggtctctgtggctgtggccgtgattccttggatcgcaatacccttggttccccttggaatcattttcatttttcttcggcgatattttttggaaacgtcaagagatgtgaagcgcctggaatctacaactcggagtccagtgttttcccacttgtcatcttctctccaggggctctggaccatccgggcatacaaagcagaagagaggtgtcaggaactgtttgatgcacaccaggatttacattcagaggcttggttcttgtttttgacaacgtcccgctggttcgccgtccgtctggatgccatctgtgccatgtttgtcatcatcgttgcctttgggtccctgattctggcaaaaactctggatgccgggcaggttggtttggcactgtcctatgccctcacgctcatggggatgtttcagtggtgtgttcgacaaagtgctgaagttgagaatatgatgatctcagtagaaagggtcattgaatacacagaccttgaaaaagaagcaccttgggaatatcagaaacgcccaccaccagcctggccccatgaaggagtgataatctttgacaatgtgaacttcatgtacagtccaggtgggcctctggtactgaagcatctgacagcactcattaaatcacaagaaaaggttggcattgtgggaagaaccggagctggaaaaagttccctcatctcagccctttttagattgtcagaacccgaaggtaaaatttggattgataagatcttgacaactgaaattggacttcacgatttaaggaagaaaatgtcaatcatacctcaggaacctgttttgttcactggaacaatgaggaaaaacctggatccctttaatgagcacacggatgaggaactgtggaatgccttacaagaggtacaacttaaagaaaccattgaagatcttcctggtaaaatggatactgaattagcagaatcaggatccaattttagtgttggacaaagacaactggtgtgccttgccagggcaattctcaggaaaaatcagatattgattattgatgaagcgacggcaaatgtggatccaagaactgatgagttaatacaaaaaaaaatccgggagaaatttgcccactgcaccgtgctaaccattgcacacagattgaacaccattattgacagcgacaagataatggttttagattcaggaagactgaaagaatatgatgagccgtatgttttgctgcaaaataaagagagcctattttacaagatggtgcaacaactgggcaaggcagaagccgctgccctcactgaaacagcaaaacagagatggggtttcaccatgttggccaggctggtctcaaactcctgacctcaagtgatccacctgccttggcctcccaaactgctgagattacaggtgtgagccaccacgcccagcctgagtatacttcaaaagaaattatccacatattggtcacactgaccacatggttacaaacacttccaatggacagccctcgaccttaactattttcgagacagcactgtgaatccaaccaaaatgtcaagtccgttccgaaggcatttgccactagtttttggactatgtaaaccacattgtacttttttttactttggcaacaaatatttatacatacaagatgctagttcatttgaatatttctcccaacttatccaaggatctccagctctaacaaaatggtttatttttatttaaatgtcaatagtkgktttttaaaatccaaatcagaggtgcaggccaccagttaaatgccgtctatcaggttttgtgccttaagagactacagnagtcagaagctcatttttaaaggagtaggacagagttgtcacaggtttttgttggtgtttktattgcccccaaaattacatgttaatttccatttatatcaggggattctatttacttgaagactgtgaagttgccattttgtctcattgttttctttgacatamctaggatccattatttcccctgaaggcttcttgkagaaaatagtacagttacaaccaataggaactamcaaaaagaaaaagtttgtgacattgtagtagggagtgtgtaccccttactccccatcaaaaaaaaaaatggatacatggttaaaggatagaagggcaatattttatcatatgttctaaaagagaaggaagagaaaatactactttctcaaaatggaagcccttaaaggtgctttgatactgaaggacacaaatgtgaccgtccatcctcctttagagttgcatgacttggacacggtaactgttgcagttttagactcagcattgtgacacttcccaagaaggccaaacctctaaccgacattcctgaaatacgtggcattattcttttttggatttctcatttaggaaggctaaccctctgttgamtgtamkccttttggtttgggctgtattgaaatcctttctaaattgcatgaataggctctgctaaccgtgatgagacaaactgaaaattattgcaagcattgactataattatgcagtacgttctcaggatgcatccaggggttcattttcatgagcctgtccaggttagtttactcctgaccactaatagcattgtcatttgggctttctgttgaatgaatcaacaaaccacaatacttcctgggaccttttgtactttatttgaactatgagtctttaatttttcctgatgatggtggctgtaatatgttgagttcagtttactaaaggttttactattatggtttgaagggagtctcatgacctctcagaaaaggtgcacctccctgaaattgcatatatgtatatagacatgcacacgtgtgcatttgtttgtatacatatatttgtccttcgtatagcaagttttttgctcatcagcagagagcaacagatgttttattgagtgaagccttaaaaagcacacaccacacacagctaactgccaaaatacattgaccgtagtagctgttcaactcctagtacttagaaatacacgtatggttaatgttcagtccaacaaaccacacacagtaaatgtttattaatagtcatggttcgtattttaggtgactgaaattgcaacagtgatcataatgaggtttgttaaaatgatagctatattcaaaatgtctatatgtttatttggacttttgaggttaaagacagtcatataaacgtcctgtttctgttttaatgttatcatagaattttttaatgaaactaaattcaattgaaataaatgatagttttcatctccaaaaaaaaaaaaaaagggcggcccgctcgagtctagagggcccggtttaaacccgctgatcagcctcgactgtgccttctagttgccagccatctgttgtttggccctcccccgtgccttccttgaccctggaaggggccactccc

SEQ ID NO: 537 - protein, 1228 aa, Homo sapiens
MLPVYQEVKPNPLQDANLCSRVFFWWLNPLFKIGHKRRLEEDDMYSVLPEDRSQHLGEELQGFWDKEVLRAENDAQKPSLTRAIIKCYWKSYLVLGIFTLIEESAKVIQPIFLGKIINYFENYDPMDSVALNTAYAYATVLTFCTLILAILHHLYFYHVQCAGMRLRVAMCHMIYRKALRLSNMAMGKTTTGQIVNLLSNDVNKFDQVTVFLHFLWAGPLQAIAVTALLWMEIGISCLAGMAVLIILLPLQSCFGKLFSSLRSKTATFTDARIRTMNEVITGIRIIKMYAWEKSFSNLITNLRKKEISKILRSSCLRGMNLASFFSASKIIVFVTFTTYVLLGSVITASRVFVAVTLYGAVRLTVTLFFPSAIERVSEAIVSIRRIQTFLLLDEISQRNRQLPSDGKKMVHVQDFTAFWDKASETPTLQGLSFTVRPGELLAVVGPVGAGKSSLLSAVLGELAPSHGLVSVHGRIAYVSQQPWVFSGTLRSNILFGKKYEKERYEKVIKACALKKDLQLLEDGDLTVIGDRGTTLSGGQKARVNLARAVYQDADIYLLDDPLSAVDAEVSRHLFELCICQILHEKITILVTHQLQYLKAASQILILKDGKMVQKGTYTEFLKSGIDFGSLLKKDNEESEQPPVPGTPTLRNRTFSESSVWSQQSSRPSLKDGALESQDTENVPVTLSEENRSEGKVGFQAYKNYFRAGAHWIVFIFLILLNTAAQVAYVLQDWWLSYWANKQSMLNVTVNGGGNVTEKLDLNWYLGIYSGLTVATVLFGIARSLLVFYVLVNSSQTLHNKMFESILKAPVLFFDRNPIGRILNRFSKDIGHLDDLLPLTFLDFIQTLLQVVGVVSVAVAVIPWIAIPLVPLGIIFIFLRRYFLETSRDVKRLESTTRSPVFSHLSSSLQGLWTIRAYKAEERCQELFDAHQDLHSEAWFLFLTTSRWFAVRLDAICAMFVIIVAFGSLILAKTLDAGQVGLALSYALTLMGMFQWCVRQSAEVENMMISVERVIEYTDLEKEAPWEYQKRPPPAWPHEGVIIFDNVNFMYSPGGPLVLKHLTALIKSQEKVGIVGRTGAGKSSLISALFRLSEPEGKIWIDKILTTEIGLHDLRKKMSIIPQEPVLFTGTMRKNLDPFNEHTDEELWNALQEVQLKETIEDLPGKMDTELAESGSNFSVGQRQLVCLARAILRKNQILIIDEATANVDPRTDELIQKKSGRNLPTAPC

SEQ ID NO: 538 - protein, 1261 aa, Homo sapiens
MYSVLPEDRSQHLGEELQGFWDKEVLRAENDAQKPSLTRAIIKCYWKSYLVLGIFTLIEESAKVIQPIFLGKIINYFENYDPMDSVALNTAYAYATVLTFCTLILAILHHLYFYHVQCAGMRLRVAMCHMIYRKALRLSNMAMGKTTTGQIVNLLSNDVNKFDQVTVFLHFLWAGPLQAIAVTALLWMEIGISCLAGMAVLIILLPLQSCFGKLFSSLRSKTATFTDARIRTMNEVITGIRIIKMYAWEKSFSNLITNLRKKEISKILRSSCLRGMNLASFFSASKIIVFVTFTTYVLLGSVITASRVFVAVTLYGAVRLTVTLFFPSAIERVSEAIVSIRRIQTFLLLDEISQRNRQLPSDGKKMVHVQDFTAFWDKASETPTLQGLSFTVRPGELLAVVGPVGAGKSSLLSAVLGELAPSHGLVSVHGRIAYVSQQPWVFSGTLRSNILFGKKYEKERYEKVIKACALKKDLQLLEDGDLTVIGDRGTTLSGGQKARVNLARAVYQDADIYLLDDPLSAVDAEVSRHLFELCICQILHEKITILVTHQLQYLKAASQILILKDGKMVQKGTYTEFLKSGIDFGSLLKKDNEESEQPPVPGTPTLRNRTFSESSVWSQQSSRPSLKDGALESQDTENVPVTLSEENRSEGKVGFQAYKNYFRAGAHWIVFIFLILLNTAAQVAYVLQDWWLSYWANKQSMLNVTVNGGGNVTEKLDLNWYLGIYSGLTVATVLFGIARSLLVFYVLVNSSQTLHNKMFESILKAPVLFFDRNPIGRILNRFSKDIGHLDDLLPLTFLDFIQTLLQVVGVVSVAVAVIPWIAIPLVPLGIIFIFLRRYFLETSRDVKRLESTTRSPVFSHLSSSLQGLWTIRAYKAEERCQELFDAHQDLHSEAWFLFLTTSRWFAVRLDAICAMFVIIVAFGSLILAKTLDAGQVGLALSYALTLMGMFQWCVRQSAEVENMMISVERVIEYTDLEKEAPWEYQKRPPPAWPHEGVIIFDNVNFMYSPGGPLVLKHLTALIKSQEKVGIVGRTGAGKSSLISALFRLSEPEGKIWIDKILTTEIGLHDLRKKMSIIPQEPVLFTGTMRKNLDPFNEHTDEELWNALQEVQLKETIEDLPGKMDTELAESGSNFSVGQRQLVCLARAILRKNQILIIDEATANVDPRTDELIQKKIREKFAHCTVLTIAHRLNTIIDSDKIMVLDSGRLKEYDEPYVLLQNKESLFYKMVQQLGKAEAAALTETAKQRWGFTMLARLVSNS

SEQ ID NO: 539 - protein, 10 aa, Artificial Sequence
  Made in a lab
CLSHSVAVVT

SEQ ID NO: 540 - protein, 9 aa, Artificial Sequence
  Made in a lab
AVVTASAAL

SEQ ID NO: 541 - protein, 14 aa, Homo sapiens
LAGLLCPDPRPLEL

SEQ ID NO: 542 - protein, 15 aa, Homo sapiens
TQVVFDKSDLAKYSA

SEQ ID NO: 543 - protein, 12 aa, Homo sapiens
FMGSIVQLSQSV

SEQ ID NO: 544 - protein, 18 aa, Homo sapiens
TYVPPLLLEVGVEEKFMT

SEQ ID NO: 545 - protein, 18 aa, Homo sapiens
MDRLVQRFGTRAVYLASV

SEQ ID NO: 546 - protein, 29 aa, Homo sapiens
FVGEGLYQGVPRAEPGTEARRHYDEGVRM

SEQ ID NO: 547 - protein, 58 aa, Homo sapiens
VAEEAALGPTEPAEGLSAPSLSPHCCPCRARLAFRNLGALLPRLHQLCCRMPRTLRRL

SEQ ID NO: 548 - protein, 18 aa, Homo sapiens
IDWDTSALAPYLGTQEEC

SEQ ID NO: 549 - protein, 18 aa, Homo sapiens
LEALLSDLFRDPDHCRQA

SEQ ID NO: 550 - protein, 14 aa, Homo sapiens
SDHWRGRYGRRRPF

SEQ ID NO: 551 - protein, 11 aa, Artificial Sequence
  Made in a lab
FDKSDLAKYSA

SEQ ID NO: 552 - DNA, 2577 bp, Homo sapiens
agcatatgtaacatgacctgtgcttcagtgttcttttgtgatcaaaaattccttacttttagttttttatctatggtagaaccacccagagcaggggtcctcaactcccaggccacagactcataccagtccacggactattatgaaccacaccacacaggaggaggtgagcactaggcaagccaaggaagcttcacctgtacttacagccacacgccatggctcatattacagcctgaactctgcctccactcagatcagtgataacattagaaactcattggagcacgaaccctgttgtgaactgcctatccgaaggatctaggttgtgtgcttcgtatgagaatctaatgccagatgatctatcattgtctcactttgcccccagataagaccatctagttgcagaaaaataagctcagagcttccactgattctacattatggatatgtgccgccgaagcaagcacaaagccctacttttacacatgcctagtgatgcttcatggacaaggcttggctctgttgagtccaactaacctacctgagattctgagatttctcttcaatggcttcctgtgagctagagtttgaaaatatcttaaaatcttgagctagagatggaagtagcttggacgattttcattatcatgtaaatcgggtcactcaaggggccaaccacagctgggagccactgctcaggggaaggttcatatgggactttctactgcccaaggttctatacaggatataaaggtgcctcacagtatagatctggtagcaaagaagaagaaacaaacactgatctctttctgccacccctctgaccctttggaactcctctgaccctttagaacaagcctacctaatatctgctagagaaaagaccaacaacggcctcaaaggatctcttaccatgaaggtctcagctaattcttggctaagatgtgggttccacattaggttctgaatatggggggaagggtcaatttgctcattttgtgtgtggataaagtcaggatgcccaggggccagagcagggggctgctgctttgggaacaatggctgagcatataaccataggtatgggaacaaaaaacatcaaagtcactgtatcaattgccatgaagactcgagggacctgaatctaccgattcatcttaaggcagcaggaccagtttgagtggcaacaatgcagcagcagaatcaatggaaacaacagaatgattgcaatgtccttttttttctcctccttctgacttgataaaagggaccgtcttccttggatttagtgaacccctttggttcctgaaaaattcaaggagtatctaggacatagtccccagaagacagtacaagactttctgataaactggacatttcaagrcccaaataactaatcagaaaaatcaaagatgtgatactattttttatcccatgcataggtgctacacttggatcaaatgaacaatgttgggatctytatggataaaggtcttaaaagtcctgagataaagaatcctgcacccactggtacttctaacttgtcttgttttttgtctgwtttctggctgatgcaggggactaactcactgccacgcgaaaactacctgaactgaactatgacatctcacctgatatgtaagatgtaactgttataattattttaaacctcaatttagcattaactagccttttaatgtaaacacttacacattatgaygactagaaacagcatactctctggccgtctgtccagatagatcttgagaagatacatcaatgttttgctcaagtagaaggctgactatacttgccgatccacaacatacagcaagtatgagagcagttctaaaatgacagagataggaacagtaataaagttattktaaaagctaatttgatatactttaccaatttaacatcttgcctgtccgtgcagaatcaaacatttacatgcactaaaagacataagcatcttcagtgctcaagtgttcatctttgtaaaataccaccaaggttaaaaggaagggacaaaaaaaaaaaaccctcttatctcagtggggtattgcatagcagaagctactaatttgaagtcctttgatggacaagaaacaatattagggccacttatctgaaatgaacaaagatttaagtgaagatttcatcacagcttccctagactgatatgctgtaatagaaaatcagctagggggtaaaataaataagagctctctgcatgctgaaagcaagtaagattaataataatggtaagaatagtagtcacaggagtttcagttaatgatgccaataagcatgtgctaggcactgaattaaatgccacatatatctttcttatgcgcagcaaactttgaaggatatattctcctacttttcatatatgacaacatatttggtggtaaataacgttcccaaggtcacacacctagcaagtaagaaagttaggaattaaacccagtattgtgtgaatctaaagcctaacttttttctctttatcacccacctacggcttgtcttcattaaaggaaaagtgtatccacttaaaaaaaaaaaaaa

SEQ ID NO: 553 - protein, 58 aa, Homo sapiens
SICNMTCASVFFCDQKFLTFSFLSMVEPPRAGVLNSQATDSYQSTDYYEPHHTGGGEH

SEQ ID NO: 554 - protein, 59 aa, Homo sapiens
LQKNKLRASTDSTLWICAAEASTKPYFYTCLVMLHGQGLALLSPTNLPEILRFLFNGFL

SEQ ID NO: 555 - protein, 71 aa, Homo sapiens
LGRFSLSCKSGHSRGQPQLGATAQGKVHMGLSTAQGSIQDIKVPHSIDLVAKKKKQTLISFCHPSDPLELL

SEQ ID NO: 556 - protein, 81 aa, Homo sapiens
NHPEQGSSTPRPQTHTSPRTIMNHTTQEEVSTRQAKEASPVLTATRHGSYYSLNSASTQISDNIRNSLEHEPCCELPIRRI

SEQ ID NO: 557 - protein, 54 aa, Homo sapiens
SLSATPLTLWNSSDPLEQAYLISAREKTNNGLKGSLTMKVSANSWLRCGFHIRF

SEQ ID NO: 558 - protein, 77 aa, Homo sapiens
  VARIANT (1)...(77): Xaa = Any amino acid
NDRDRNSNKVIXKANLIYFTNLTSCLSVQNQTFTCTKRHKHLQCSSVHLCKIPPRLKGRDKKKKPSYLSGVLHSRSY

SEQ ID NO: 559 - protein, 50 aa, Homo sapiens
TLPPLRSVITLETHWSTNPVVNCLSEGSRLCASYENLMPDDLSLSHFAPR

SEQ ID NO: 560 - protein, 56 aa, Homo sapiens
IGSLKGPTTAGSHCSGEGSYGTFYCPRFYTGYKGASQYRSGSKEEETNTDLFLPPL

SEQ ID NO: 561 - protein, 57 aa, Homo sapiens
  VARIANT (1)...(57): Xaa = Any amino acid
VLHLDQMNNVGIXMDKGLKSPEIKNPAPTGTSNLSCFLSXFWLMQGTNSLPRENYLN

SEQ ID NO: 562 - protein, 59 aa, Homo sapiens
  VARIANT (1)...(59): Xaa = Any amino acid
DLYPXRSQHCSFDPSVAPMHGIKNSITSLIFLISYLXLEMSSLSESLVLSSGDYVLDTP

SEQ ID NO: 563 - protein, 79 aa, Homo sapiens
CFLFPYLWLYAQPLFPKQQPPALAPGHPDFIHTQNEQIDPSPHIQNLMWNPHLSQELAETFMVRDPLRPLLVFSLADIR

SEQ ID NO: 564 - protein, 64 aa, Homo sapiens
ACSKGSEEFQRVRGVAERDQCLFLLLCYQIYTVRHLYILYRTLGSRKSHMNLPLSSGSQLWLAP

SEQ ID NO: 565 - protein, 57 aa, Homo sapiens
  VARIANT (1)...(57): Xaa = Any amino acid
LYYCSYLCHFRTALILAVCCGSASIVSLLLEQNIDVSSQDLSGQTAREYAVSSXHNV

SEQ ID NO: 566 - protein, 55 aa, Homo sapiens
ILLEFFRNQRGSLNPRKTVPFIKSEGGEKKGHCNHSVVSIDSAAALLPLKLVLLP

SEQ ID NO: 567 - protein, 51 aa, Homo sapiens
YSDFDVFCSHTYGYMLSHCSQSSSPLLWPLGILTLSTHKMSKLTLPPIFRT

SEQ ID NO: 568 - protein, 75 aa, Homo sapiens
KVGEYILQSLLRIRKIYVAFNSVPSTCLLASLTETPVTTILTIIINLTCFQHAESSYLFYPLADFLLQHISLGKL

SEQ ID NO: 569 - DNA, 4809 bp, Homo sapiens
gcatccagagtggtggactggttacaggctatgaacctacactgatgcggcaccaccacccagagtccacrggttatgttggttcacatttactcttgctgtggtatggtctataggtttggacagatgtccgataatcctttttacattttggcatccttgggtagctcgtcttgtaggaatggacttgcttcaaagtggaggcaggcagatccttcagacgggtatatggagccctgttttcagttgcttttctaattctctcttatcgtttacctcaaaatcttcctgaggtctcgcttccttttaaaatccttgtctactttgcagcatcactctgacactcccattgattcctcagcacctactgactacacggttaggagtgcaagggtagaattcatgttttattcatctttgggtctgtagcacccagcaaagtgctcagtaaatgcgcagtaattgatttgacctctgaacaaatacacactgtactaagaatctacacaccgaaagacaaaaacaagacaaatttgagtgctacaggtgtcacgcttggcatcacacatgtgcctgtgtattcctctaggtggttaccaggagctctgccactgcatgtccactagtgacgggttcgctccaccaccccagctgggtagccgctgctctcacataaggggtccaattaaaattgccaggaataaattcccccggactttgacttctcaagagctaagaaggtttgctgagtattctggcatgatgtttggtgatcaaacaactgctggccaaaaatgatgagtatttccccctcttgctgaagatgtgctccatacaatagtccatcacattcatcattcatcagtctggaagtgtgcagaacaacatgtaatagataatatgattggctgcacacttccagactgatgaatgatgaatgtgatggactattgtatggagcacatcttcagcaagagggggaaatactcatcattttatctattacatgttgttctggtttttttttttttccaatgtccagcctaaactataaagtactttgagaacgcacagtgagccataagcttgccaataaagagtcctctgtggtatggaactggcttatttcatacacaatctgcaaacaatgagggcactattggaaacatactgtgctgcacagagcatttacaccgcttatctttaatcttccccagcaatccttgctttgtgcgcatttatgatccttgctctcagaagtccacatacttttccccaaccgtaacaaattatttaactcatctaatgtatgtatgtccgcgcagtctgaaaacagtaattgtccttgggaagaagtgagtttaagagagctctagggcactcatcacaactccagccctgccctccatgtggtagcagctctttggactggggctaagtgcttattcttgtgcttcattcctggtaagctcaatttctttaccttaggataactttgctggaaaagggctcagattcagccgaccattgtggcctctgtggctgtcacagcttgtccctgacatgctatgatgttgggtccccttctcatccccttgggatttcttctgctggcccacagccagaacaactaggccttttactccaccatccctttgttttcttttgtttcgttggtaaaaatcaatccttctaccatccatgcatagcaatttctaaaaactgaatttcaagagcagtatctgaagaaacaaacatgatttggtccttttagtaaacagaataaattttaataaatcaactttgaaatagttgtaagagttaagaaaaagcacaaaactgagatcatcagagcagcttggcctcaaaggacaggcagcaggattctacagggtttgagccttcctaagtgaagctgtttcctgcaggctccctgctccaagctcctagctaacagccccttctcccacgattggcaacaaagagcaaaaataactttgtacttgatgctgagtcagtgtaaaaagccataaaaaattccctctaaatgtcaaaatgtttgcctcctttgaggcttctctcctcctactgggtctggataaattagcactgggcttatattgagtcacagatctgggccctgccacagagagcttcctcctagtgtgtgatgctttttctccaaactattgatacaaaatgcactggaatagaaatcaacagaaactggtcaaaggtgtggcatacacattctcatgtagatgtaaagctgtgcttagaattcctttgtggagtctggtttggtcttggttttcttggtgtttgattcatttttttacgtaaattacaaaaaccctccacatttcttcatggattgtattagtccatgttctccagagaagcagaacgagttggatgtatgttttggaagagattatgaggaaccggctcatgtgatgaaggaggttgagaggtcctgtgctctgccatctgcaagctgaagacctggaaagctgagggtgtggctccagtctgagtctgaaggcccaagaaccaggggaaccaacggtgtagattccaggttgaaggcaggagaagatggatgtcccagctcagcaggcaggcaggaagcaaatggggtaaattcctccttcctccaccttttgttccattcaggccttcaacagattggatgagcgcccccccacccccacactagggagggccatctgctttactgagtcggctgagtcaagtgccagcctcatcccaaaacactctccagacacacgcagaaatgtttcatctgggcaccctgtggccagtcatgctgacacacagaactaaccatgacatggattcttcttaaagcagtgataggagcgaacagaaacattttcataattttcaattatttttaatgaaaactatatctgatggaattgtttaaacctagtctggccacacattatttcctgggaccgcccctccttcaatcccttggacactgatgactttatgcccagattacactggaggcctgtgctgattttctaacacatacctgcaactgagctggcaaaaagaaaactaggcaagtatgacagatacatgatgcacaggctaagtgcaaaggaaagaaaaacaccaactgcagggatgagggactcacccctttagaagtttctacttgagcagctagaagactacaatgccactcatcaaaacagtgactcagggggagtatttgggataaaggaggaatctgatgttggaggtcaaatttgaagtgtctttaagacctacaggtaacgagacagctggacaaacacatggaactcaggacaaaggctctaaggacagcacagcagctgacatcctgtgtgacagccttgaaagcagcaggcccgccgctcacattttggaagggaaaatgggtacaatgttgtctgccactttggggccttcttgggtcacatgcattttacatttatgcagttgatatatttatgtttcctgggtcttttatacattagacaccatgattctcaatcctttgttattttgtattacaaaaagctgaattattatttcaaatatgggcaaattagagccttccatattgccaaggtgtatcaaccacactgataycaygatctctcttttgaattagttttccagttcacacctaccatttatttcatgattggtttcagacttgttcctcctggaaacactccctaacaagcacccttgcaggaatgaagacacaccacacacatctaccccattactgcatgtactcaagagtcagcttttatatgatctctcccaagtgctcctataatggggatctttcactcaccctaaagtgaggacaaaatacttgaaagcatgagcccagtgcctgtaggtgtgcaattaacctcagaccaaggaagtgccgaacgcatctggcttttagcaaggcacctgacaaagtccttcaggatgtttttgtacatgagctagagaaatgtacctggagaacagcttctactgccagatgatcttactcaaaagatgcagattaagcaaaatatcaacccaaagggtggtccctgatggcccaccagcccctgtgcctggctcgtttcctatgtttcctagatttggtttcagacttgctcctcctgcagacactccctaaccagcatccttgcagaaaactggtgaactagaaaaggcctgtgtgggtcacgtggccacccaacaccacagcagtgtctaaggtatgcgtgggagcctgcacagcaggagcggggtcttctggagacccgcatgagatgcaaagggcagtggacaaggagccaagggaggtggctctagtcacgctggtatggtgccagcttgaggatgctgggcaagtcccgagccgtctgccttcctagtaccacagttaccactgtctgttacctcgcgagttcaagtgcttcacgtgagacagctacgagacaggcccctggaaactggaaaatgcyaagtaaatgtcatgcacaattgttgttcacattttatctcaatcacttttaccaaatcaggctaaaccctgggtattcataacgtcttgggctgtacaaattgttccttgaaatgactcagagacattttctgaattggcttccatcagccaagcatttcttcagaactggaaaaatgctttaaatttggctttgtcatgattattaaaacactctgtacattttttattattgaaattaacacattgcctactttttaaaaattggaaaaagaaaaaaaaaaaaaaaa

SEQ ID NO: 570 - DNA, 951 bp, Homo sapiens
aaaattgaatattgagataccattctttagtgttaccttttttacccacatgtgtttctgaaaatattggaattttattcatcttaaaaattggacccggccttatttaccatctttaatccattttagtactatgggtgagtacatggaattgaagtctggcttaaatcttcagaaagttatatatctattttattttatttttttgagacagagtctcgctgtgtcacccaggctggagtgcggtgccacaatcttggctcactgcaacctctgagtcccaggttcaagcgatactcatgcctcggcctcctgagtagctgggactacaggcgtgcaccaccacatctggctaatctttttttgtatttttagtagagacggggtttcactgtggtctccatctcctgacctcgtgatccgcctgcctcccaaagtgctgggattacaggcatgagccaccgcacacagctgggactgggtaatttataaagaaaagaggtttaatgactcacagttccgcatggctggagaggcctcaggaaacttacaatcatggtggaaggcgaaggggaagcaaggcacgtcttacatggtggcaggagagaacgagtgaggggggagactgccacaaactttttttttttgagacaagagtctggccctgttgcccaggctggagtgcagtggcatgatctcagctcactgcaacctctgcctcacaggttcaagcaattctcatgcctcagcctcccgcatagctgggaccacaggtatgcaccaccacacctagctaatttttgtagttttagtagagatggggtctcactatgttgctcaggctggtctaaaactcctgggctccagcaatccgcctgccttggcctcccaaagtgctggggttacaggcataagccaccacatccagcctgccacatacttttaaactat

SEQ ID NO: 571 - DNA, 819 bp, Homo sapiens
cagcttaaaaatggtttcttgaaatcagtgattagcattcactcaccagtacccctactaaggggtaggcactggtttgtactcctgggaatacaggagtacaccagaatttatttctgcttattgcttttgttgcaaatgccgtggcttcatctgaggaattctagaattcagagggtgtagccctccactctgctgtcttgctatctgctctcattgcatccgtttaacctgcattctgaaagatgtttctcaggtttttccttgacgattttcttcttttctgattctgacaatgttttaaatcattgtactgtggttatcatttctctgcatttattttacccatcttcctttgtaacttgtcctattgtcttttaatttctgcctgttctttatggctttcaacttcataaataacatgttttctcaaatctctttgtgaattccagagagggccaggcacggtggctcacatctgtaatcccagcactttggggaggctgagacgggtggatcacttgaggtcaggagtttgagaccagcctggccaacatggtgaaatcccgtttcactaaaaatacaaaaattacccaggcatggtggcgggcgcctgtaatcccaggtactcgggaggctgagggaggagaatcgcttgaacctgggaggctgagggaggagaatcgcttgaacccgggaggcagaggttgcagtgaaccgagatcatgttgctgcactccagcctggtcaacagagcaagactctgcctcaaaaacaaacaaataaacaaacaaacaaacaaaacagagagattttgct

SEQ ID NO: 572 - DNA, 203 bp, Homo sapiens
tatagaatactcaagctatgcatcaagcttggtaccgagctcggatccactatttacggccgccagtgtgctggaattcgcccttagctcggatccactagtccagtgtggtggaattccattgtgttgggcccaacacaatggagccaccacatccagcctgccacatacttttaaactatcaggtctcatgagaactcatg

SEQ ID NO: 573 - protein, 132 aa, Homo sapiens
MVEGEGEARHVLHGGRRERVRGETATNFFFLRQESGPVAQAGVQWHDLSSLQPLPHRFKQFSCLSLPHSWDHRYAPPHLANFCSFSRDGVSLCCSGWSKTPGLQQSACLGLPKCWGYRHKPPHPACHILLNY

SEQ ID NO: 574 - protein, 62 aa, Homo sapiens
MTHSSAWLERPQETYNHGGRRRGSKARLTWWQERTSEGGDCHKLFFFETRVWPCCPGWSAVA

SEQ ID NO: 575 - protein, 76 aa, Homo sapiens
MVKSRFTKNTKITQAWWRAPVIPGTREAEGGESLEPGRLREENRLNPGGRGCSEPRSCCCTPAWSTEQDSASKTNK

SEQ ID NO: 576 - protein, 68 aa, Homo sapiens
  VARIANT (1)...(68): Xaa = Any Amino Acid
MLGKSRAVCLPSTTVTTVCYLASSSASRETATRQAPGNWKMXSKCHAQLLFTFYLNHFYQIRLNPGYS

SEQ ID NO: 577 - protein, 57 aa, Homo sapiens
MYLENSFYCQMILLKRCRLSKISTQRVVPDGPPAPVPGSFPMFPRFGFRLAPPADTP

SEQ ID NO: 578 - protein, 51 aa, Homo sapiens
MQLIYLCFLGLLYIRHHDSQSFVILYYKKLNYYFKYGQIRAFHIAKVYQPH

SEQ ID NO: 579 - protein, 56 aa, Homo sapiens
MHFTFMQLIYLCFLGLLYIRHHDSQSFVILYYKKLNYYFKYGQIRAFHIAKVYQPH

SEQ ID NO: 580 - protein, 67 aa, Homo sapiens
MELRTKALRTAQQLTSCVTALKAAGPPLTFWKGKWVQCCLPLWGLLGSHAFYIYAVDIFMFPGSFIH

SEQ ID NO: 581 - protein, 77 aa, Homo sapiens [sequence omitted]

SEQ ID NO: 582 - protein, 51 aa, Homo sapiens
MLFLQTIDTKCTGIEINRNWSKVWHTHSHVDVKLCLEFLCGVWFGLGFLGV

SEQ ID NO: 583 - protein, 60 aa, Homo sapiens [sequence omitted]

SEQ ID NO: 584 - protein, 76 aa, Homo sapiens
MCLCIPLGGYQELCHCMSTSDGFAPPPQLGSRCSHIRGPIKIARNKFPRTLTSQELRRFAEYSGMMFGDQTTAGQK

SEQ ID NO: 585 - protein, 50 aa, Homo sapiens
MVYRFGQMSDNPFYILASLGSSSCRNGLASKWRQADPSDGYMEPCFQLLF

SEQ ID NO: 586 - protein, 60 aa, Homo sapiens
MLVHIYSCCGMVYRFGQMSDNPFYILASLGSSSCRNGLASKWRQADPSDGYMEPCFQLLF

SEQ ID NO: 587 - DNA, 1408 bp, Homo sapiens
ctggacactttgcgagggcttttgctggctgctgctgctgcccgtcatgctactcatcgtagcccgcccggtgaagctcgctgctttccctacctccttaagtgactgccaaacgcccaccggctggaattgctctggttatgatgacagagaaaatgatctcttcctctgtgacaccaacacctgtaaatttgatggggaatgtttaagaattggagacactgtgacttgcgtctgtcagttcaagtgcaacaatgactatgtgcctgtgtgtggctccaatggggagagctaccagaatgagtgttacctgcgacaggctgcatgcaaacagcagagtgagatacttgtggtgtcagaaggatcatgtgccacagatgcaggatcaggatctggagatggagtccatgaaggctctggagaaactagtcaaaaggagacatccacctgtgatatttgccagtttggtgcagaatgtgacgaagatgccgaggatgtctggtgtgtgtgtaatattgactgttctcaaaccaacttcaatcccctctgcgcttctgatgggaaatcttatgataatgcatgccaaatcaaagaagcatcgtgtcagaaacaggagaaaattgaagtcatgtctttgggtcgatgtcaagataacacaactacaactactaagtctgaagatgggcattatgcaagaacagattatgcagagaatgctaacaaattagaagaaagtgccagagaacaccacataccttgtccggaacattacaatggcttctgcatgcatgggaagtgtgagcattctatcaatatgcaggagccatcttgcaggtgtgatgctggttatactggacaacactgtgaaaaaaaggactacagtgttctatacgttgttcccggtcctgtacgatttcagtatgtcttaatcgcagctgtgattggaacaattcagattgctgtcatctgtgtggtggtcctctgcatcacaaggaaatgccccagaagcaacagaattcacagacagaagcaaaatacagggcactacagttcagacaatacaacaagagcgtccacgaggttaatctaaagggagcatgtttcacagtggctggactaccgagagcttggactacacaatacagtattatagacaaaagaataagacaagagatctacacatgttgccttgcatttgtggtaatctacaccaatgaaaacatgtactacagctatatttgattatgtatggatatatttgaaatagtatacattgtcttgatgttttttctgtaatgtaaataaactatttatatcacacaatawagttttttctttcccatgtatttgttatatataataaatactcagtgatgagaaaaaaaaaaaaaaaaaaaaaarwmgaccc

SEQ ID NO: 588 - protein, 81 aa, Homo sapiens [sequence omitted]

SEQ ID NO: 589 - protein, 157 aa, Homo sapiens
MTMCLCVAPMGRATRMSVTCDRLHANSRVRYLWCQKDHVPQMQDQDLEMESMKALEKLVKRRHPPVIFASLVQNVTKMPRMSGVCVILTVLKPTSIPSALLMGNLMIMHAKSKKHRVRNRRKLKSCLWVDVKITQLQLLSLKMGIMQEQIMQRMLTN

SEQ ID NO: 590 - protein, 347 aa, Homo sapiens
MLLIVARPVKLAAFPTSLSDCQTPTGWNCSGYDDRENDLFLCDTNTCKFDGECLRIGDTVTCVCQFKCNNDYVPVCGSNGESYQNECYLRQAACKQQSEILVVSEGSCATDAGSGSGDGVHEGSGETSQKETSTCDICQFGAECDEDAEDVWCVCNIDCSQTNFNPLCASDGKSYDNACQIKEASCQKQEKIEVMSLGRCQDNTTTTTKSEDGHYARTDYAENANKLEESAREHHIPCPEHYNGFCMHGKCEHSINMQEPSCRCDAGYTGQHCEKKDYSVLYVVPGPVRFQYVLIAAVIGTIQIAVICVVVLCITRKCPRSNRIHRQKQNTGHYSSDNTTRASTRLI

SEQ ID NO: 591 - DNA, 565 bp, Homo sapien
actaaagcaaatgaacaagctgacttgctagtatcatctgcattcattgaagcacaagaacttcatgccttgactcatgtaaatgcaataggattaaaaaataaatttgatatcacatggaaacagacaaaaaatattgtacaacattgcacccagtgtcagattctacacctggccactcaggaagcaagagttaatcccagaggtctatgtcctaatgtgttatggcaaatggatgtcatgcacgtaccttcatttggaaaattgtcatttgtccatgtgacagttgatacttattcacatttcatatgggcaacctgccagacaggagaaagtacttcccatgttaaaagacatttattatcttgttttcctgtcatgggagttccagaaaaagttaaaacagacaatgggccaggttactgtagtaaagcatttcaaaaattcttaaatcagtggaaaattacacatacaataggaattctctataattcccaaggacaggccataattgaaggaactaatagaacactcaaagctcaattggttaaacaaaaaaaaaaaa

SEQ ID NO: 592 - protein, 188 aa, Homo sapien
TKANEQADLLVSSAFIEAQELHALTHVNAIGLKNKFDITWKQTKNIVQHCTQCQILHLATQEARVNPRGLCPNVLWQMDVMHVPSFGKLSFVHVTVDTYSHFIWATCQTGESTSHVKRHLLSCFPVMGVPEKVKTDNGPGYCSKAFQKFLNQWKITHTIGILYNSQGQAIIEGTNRTLKAQLVKQKKK

SEQ ID NO: 593 - DNA, 271 bp, Homo sapien
  misc_feature (1)...(271): n = A,T,C or G
actttatgttcnagtgcanaaanccncctggattgccaccntactctcagggctgtganttgtgcncccanagcaacctgggcacgcggggacaggggggccnacaattgagggagcggtgtccctagctggggtctatacatgncngggnaagggcngctgagtnccatnagcaaagganctagnatntgcgggggtgcggcctgggcctaccctttnaagcatccntngatccactccangaanccnggggtagncaggtttnccaaca

SEQ ID NO: 594 - DNA, 376 bp, Homo sapien
  misc_feature (1)...(376): n = A,T,C or G
cctttgggggnggggggaacctttaccattgtncccctttatttcatttggttngggttcgcgccctcnngggccaacaaagttatcgtnnttgaagagaanatttttttggnttngncccgattaagcgncaaatgtgtagcaaaangccgtgccacttgtggcgtagctncgtcgggtcgattcgacgacaaggcgtngcgcgntancgttagtctcnaatngacccngtggcatgagcccacganggnttcgtgtcgtcacatggnctctagacataacgcncnccnttttttncagagggggntgccgcccttagggaggnaggggtggggacactagccaanccanantctnaccccattgaagaaaaggn

SEQ ID NO: 595 - DNA, 242 bp, Homo sapien
  misc_feature (1)...(242): n = A,T,C or G
agnctgctgntcgtnccctntatgtggcttcatnntgaggacaanagtngcactgaggcttgngnatgccaggcaaggncaagctggctcaaaaagcatccacccacctctgnaangggtatgccangagcangtgcaccagtcccaactangagncccnggcatgntacatcttcttccacccctnaaantttgngctacaangnccatttttctttttctcttaagggncncntggcttc

SEQ ID NO: 596 - DNA, 535 bp, Homo sapien
  misc_feature (1)...(535): n = A,T,C or G
accagttggatactgctaaanagatatttatgcagcctcatatgttaagtcgtatattttgaaagctttttaaattttttctttaagaagattttagatgcttatcactgagtaccagagggatgtaggctgatgcccttatcaacaaagtcagggactgtggcacacaaggattgactactgcagacacggccacaatgctacctctagagggcctgaatccccctgccctctctggtggggagaagggctggcagagccattagcatgggctccggccaatcctggccactttgacactcctggtgctgacccagggtcctggaggaagggatgaggtgggcagtagagatgctcagggcagtggcccctttccatccacactggaactatttcagtattttaccaccaattcagccattcccttgtgcgctggctgaacatcagccctgctccaggtctcagtttcccctttgtaaagggaaagctctggattcagggagtgatgaagaggtcatcatggtcttgagaattc

SEQ ID NO: 597 - DNA, 257 bp, Homo sapien
  misc_feature (1)...(257): n = A,T,C or G
tttcnatacccaaaantaccccatattangaccanacatttgtctnggaaaaattaccattntntaacntttgggccacctgagannaaatgggtgtaatncatgataagatggancagnattnctcttaagatnngatnagaccccgtttttcacggaacatatccaagnacccaataggnaacaagccacgggnggagtcacaaacatatattctttactctcataatccgtnncacanaactnttgnacttgac

SEQ ID NO: 598 - DNA, 222 bp, Homo sapien
  misc_feature (1)...(222): n = A,T,C or G
nntggntaccgtcnaaacttnncttggtacccgagctcggatccactagtccagtgtggtggaattccattgtgttgggctataagctgtaatagtggagncgtgctnggttcattgcannagnccctccgcanncacncttgnnacaacctgtgagnaggcnataaattattcacataatcatcactgcatgaanctgactcaaacgcatccacntacacc

SEQ ID NO: 599 - DNA, 238 bp, Homo sapien
  misc_feature (1)...(238): n = A,T,C or G
gcatgacatcancgatgtntttggnnacctganattngctaaaactngngnatgccgggnatgnaggtttggtantgatctatgcactcacatctcatggggacgtttcatgtggagtgntcgacaangttgctgnancngagaagtgatgatctcagttgaaagggtcatgtgaatacacnttacacttgaaaaagaagcacattgggaatatcacgaaacgnccaccaacatcctg

SEQ ID NO: 600 - DNA, 232 bp, Homo sapien
  misc_feature (1)...(232): n = A,T,C or G
cgaactatttagactacctaggaaaattattttagtatcagaagaatatcaggggtgtagtactcatcagagctaaatgagagcgctttaaaaatgttagtttgtcttccgccatttctacagaaagctgcaatttcaggttttcaacctaataggtgatatttaanaaaaaaaaaaagcaatcgcaaatagccccactgcttttacaaatcattttttccccaacacaatg

SEQ ID NO: 601 - DNA, 547 bp, Homo sapien
  misc_feature (1)...(547): n = A,T,C or G
cattgtgttggggaaaaaatgatttgtataagcagtggggctatttgcgattgctttttttttttcttaaatatcacctattaggttgaaaacctgaaattgcagctttctgtagaaatggcggaagacaaactaacatttttaaagcgctctcatttagctctgatgagtactacacccctnatattcttctgatactaaaataattttcctagtgtagtctaaacttttttaaaaagacatgtaatccgcggagttagtaactcaaaacgagtgcatctnggaagtatcgcagccgttnctggatnaaattcccagcttgctngcttgctnagccggggggcggtnaaaaaaacatctgcagcccnggggnaaaaaccttcgcattgttcttacgtgtttacgttattttatttccctnnagcaaggcnggganttggggactcgaaatggtacagttgggctggggatcgcccttgttacataaaagncgtccagaagagggacggttacaggcnggganctccaaaggtcagtccctgccatt

SEQ ID NO: 602 - DNA, 826 bp, Homo sapien
  misc_feature (1)...(826): n = A,T,C or G
cggggggnnttacgtctctctggacgcttttattgtaccagggcgatcccagcccaactgtaccattcgagtccctactcctgccttgctctagggaaataaaataacgtaaacacgtaagaacaatgcgaaagcgttttcttccctaggctgcagattgtcttcttcaccgcccctgcttagctagctagctagctgggaatttaatccagaaacggcttgcgatacctcctagatgcactcgttttgagttacaaactccgcggattacatgtctttttaaaaaagtttagactacactagggaaaattattttagtatcagaagaatatcagggggtgtagtactcatcagagctnaatgagagcgctttaaaaatgttagtttgtcttccgccatttctacagaaagctgcaatttcaggttttcancctaataggtgatatntaagaaaaaaaaaacaatcgcanatagcccactgcttttacaaatcatttttctcttctaggtatagcctgtcaggtggcctaatgtatttttgacatctctaggaattttaatagaccagaaatgggtgccagagatatgcctgcactaatcttaagtggggatttatgtatttctcaancaagtgattaaagcaaaactaggcacgaatgaaatcaagatctttaggccagaaatcatgaananttttanaattattttangaatctgtggcttctcttcttaaaatngaaaaaaaaattgtttaaacccanaaggtctgaatacccaagcnccctgaacnanagaacaangccggagcaccccctcccaaatcccc

SEQ ID NO: 603 - DNA, 817 bp, Homo sapien
  misc_feature (1)...(817): n = A,T,C or G
nnangacttttgtggtnttatacaattnttttttctatttctatgaagagaaagccacagagtcctaaaataattctaaaactcatcatgactttcttgcctaaaagatcttgatttcaatcgtgcctagttttgctttaatcacttgcttgagaaatacataaatccccacttaagattagtgcaggcatatctctggcacccatttctggttctattaaaattcctagagatgtcaaaaattacattaggccacctgacaggctatacctagaagagaaaaaatgatttgtaaaagcagtggggctatttgcgattgctttttttttttcttaaatatcacctattaggttgaaaacctgaaattgcagctttctgtagaaatggcggaagacaaactaacatttttaaagcgctctcatttagctctgatgagtactacacccctgatattcttctgatactaaaataattttcctagtgtagtctaaacttttttaaaaagacatgtaatccgcggagtttgtaactcaaaacgagtgcatctaggaggtatcgcaagccgtttctggattaaattcccagctagcttgcttgcttagcaggggcgggnaaanaagacatctgcagcctagggaagaaaacctttcgcattgttcttacgtgtttacgttattttatttcctanaacaaggcngaattgggactcgaatggttcagttggggtgggggatcccctggtncataaaangtcanaaaganggtacaggcggaacnccaagggtcgtcctgcatttanactcggaattttggtgcc

SEQ ID NO: 604 - DNA, 694 bp, Homo sapien
  misc_feature (1)...(694): n = A,T,C or G
cttttcaaatcatttttnctcttctaggtatancctgtcaggtggcctaatgtaatttttgacatctctangaattttaatagaaccagaaatgggtgccagagatatgcctgcactaatcttaagtggggatttatgtatttctcaagcaagtgattaaagcaaaactaggcacgattgaaatcaagatcttttaggcaanaaagtcatgatgagttttagaattattttaggactctgtggctttctcttcatagaaatagaaaaaaaaattgtataaaaccacaaaaggtcctgaatagccaaagcaacactgancaaaaagaacanagcagggaagcaacacactaccngaattcaaattatactaccagggtgtagtaaccaaaacagcattctattggcataaaatagacaccaagaccaatggancagaataaagaaccccacaaataaatccatatatntaccgccanctgattatcaataacnaacaccaagaacatatnttaagggacntnctattcaataantagtgctggnaaaaactgggaaatccatatgcagaaanaatgaaactagacccctatccctcaccatacgcaaanntcaacttcggaatgggattacaaaacttaagacattccaacccaagaaactatnaaanctactattaagaaaacagatcncnccc

SEQ ID NO: 605 - DNA, 678 bp, Homo sapien
  misc_feature (1)...(678): n = A,T,C or G
taaaaatctagactacactaggaaattattttantatcagaagaatatcaggggtgtagtactcatcanagctaaatgagagcgctttaaaaatgttagtttgtcttccgccatttctacagaaagctgcaatttcaggttttcaacctaataggtgatatttaagaaaaaaaaaaagcaatcgcaaatagccccactgcttttacaaatcattttttctcttctaggtatagcctgtcaggtggcctaatgtaatttttgacatctctaggaattttaatagaaccagaaatgggtgccagagatatgcctgcactaatcttaagtggggatttatgtatttctcaagcaagtgattaaagcaaaactaggcacgattgaaatcaanatcttttaggcaagaaagtcatgatgagttttanaattattttaggactctgtggctttctcttcatagaaatagaaaaaaaaaattgtataaaaaccacaaaaggtcctgaatagcccaaagcaacactgaacaaaangaacaaagcaggaagcaacacactaccggaattcaattatactaccaaggtgtantaaccaaaacagcattctattgggcataaaatagaccaaagaccagtgggaaacagaataaagaancccaaaataaatcctatatttacngcccnc

SEQ ID NO: 606 - DNA, 263 bp, Homo sapien
  misc_feature (1)...(263): n = A,T,C or G
gtggggtcngcancagccaactcagcttcctttcgggctttgttagcagacggatcatcctctagtccactgtgntcaaattccattgtgtgggggccnctcgcctcggccanagatctgagtgancanacntgtccccactgaggtgccccacagcngnttgtnttcagcangggctnacaactcgaccggcagcgnanggctggcagaantgngcgcctnnctcattcctacgcngtnngccgcaggaaggangacaggcc

SEQ ID NO: 607 - DNA, 22 bp, Artificial Sequence
  Primer
ccatgtgggtcccggttgtctt

SEQ ID NO: 608 - DNA, 22 bp, Artificial Sequence
  Primer
gataggggtgctcaggggttgg

SEQ ID NO: 609 - DNA, 40 bp, Artificial Sequence
  Primer
gctggacagggggcaaaagctggggcagtgaaccatgtgc

SEQ ID NO: 610 - DNA, 27 bp, Artificial Sequence
  Primer
ccttgtccagatagcccagtagctgac

SEQ ID NO: 611 - DNA, 46 bp, Artificial Sequence
  Primer
gatagagaaaaccgtccaggccagtattgtgggaggctgggagtgc

SEQ ID NO: 612 - DNA, 40 bp, Artificial Sequence
  Primer
gcacatggttcactgccccagcttttgccccctgtccagc

SEQ ID NO: 613 - DNA, 38 bp, Artificial Sequence
  Primer
gccgctcgagttagaattcggggttggccacgatggtg

SEQ ID NO: 614 - DNA, 53 bp, Artificial Sequence
  Primer
cggcgggcatatgcatcaccatcaccatcacatcataaacggcgaggactgca

SEQ ID NO: 615 - DNA, 46 bp, Artificial Sequence
  Primer
gcactcccagcctcccacaatactggcctggacggttttctctatc

SEQ ID NO: 616 - DNA, 1350 bp, Homo sapien
atgcatcaccatcaccatcacatcataaacggcgaggactgcagcccgcactcgcagccctggcaggcggcactggtcatggaaaacgaattgttctgctcgggcgtcctggtgcatccgcagtgggtgctgtcagccgcacactgtttccagaactcctacaccatcgggctgggcctgcacagtcttgaggccgaccaagagccagggagccagatggtggaggccagcctctccgtacggcacccagagtacaacagacccttgctcgctaacgacctcatgctcatcaagttggacgaatccgtgtccgagtctgacaccatccggagcatcagcattgcttcgcagtgccctaccgcggggaactcttgcctcgtttctggctggggtctgctggcgaacggcagaatgcctaccgtgctgcagtgcgtgaacgtgtcggtggtgtctgaggaggtctgcagtaagctctatgacccgctgtaccaccccagcatgttctgcgccggcggagggcaagaccagaaggactcctgcaacggtgactctggggggcccctgatctgcaacgggtacttgcagggccttgtgtctttcggaaaagccccgtgtggccaagttggcgtgccaggtgtctacaccaacctctgcaaattcactgagtggatagagaaaaccgtccaggccagtattgtgggaggctgggagtgcgagaagcattcccaaccctggcaggtgcttgtggcctctcgtggcagggcagtctgcggcggtgttctggtgcacccccagtgggtcctcacagctgcccactgcatcaggaacaaaagcgtgatcttgctgggtcggcacagcctgtttcatcctgaagacacaggccaggtatttcaggtcagccacagcttcccacacccgctctacgatatgagcctcctgaagaatcgattcctcaggccaggtgatgactccagccacgacctcatgctgctccgcctgtcagagcctgccgagctcacggatgctgtgaaggtcatggacctgcccacccaggagccagcactggggaccacctgctacgcctcaggctggggcagcattgaaccagaggagttcttgaccccaaagaaacttcagtgtgtggacctccatgttatttccaatgacgtgtgtgcgcaagttcaccctcagaaggtgaccaagttcatgctgtgtgctggacgctggacagggggcaaaagctggggcagtgaaccatgtgccctgcccgaaaggccttccctgtacaccaaggtggtgcattaccggaagtggatcaaggacaccatcgtggccaaccccgaattctaa

SEQ ID NO: 617 - protein, 449 aa, Homo sapien [sequence omitted]

SEQ ID NO: 618 - DNA, 385 bp, Homo sapien
  misc_feature (1)...(385): n = A,T,C or G
ctgtgctgagaaccaaaagctatgancactgcttttccaaatgtccataanaccaacatttttatcactaccaccatcacctgggagctcnttagaaagctagtctcccgggcaccaccctggcctactgaacctaatgtgcatttaacaagattnacgtngaaatctgcaaagcacaggggcngataacagtaccacctgntctggttcctanccccangacccttacagtctaactgggacacaagggcttnaaatcaaattgcctatcattaagatatacaangancntgagaaactgctncacttatntattaaggngctctaagacttagaaacnaaangcantgctgagangattcaaatatgangggggncactttnc

SEQ ID NO: 619 - DNA, 869 bp, Homo sapien
  misc_feature (1)...(869): n = A,T,C or G
gatatcccgggaattcgcggccgcgtcgacctctacttgtttagacataaatgcagtctagcattaaagatcctttaaaaaaatgttttcccaatggttaaaagacaagctcaaataaatgaactctcatacatatgccaaaattgatgagtagataaatatttcagtaggtagttactagctttctgtgtatgagtaaacatatgggagaaatttaaaacactaaagtagactcaatgaaagcatagtatcctatgtattcgtttttcagaaatgtctaatgaaggaaggaaacaatgaatgaatgcccttattcctcttagagtgctgggacatggttttgcctgaaaacttcatgtgaattttatattttgctacacattacacccatcttagacttatacgtataagacataaggcatatcttatgtcttacatgtataataatctaagcagaacaaaaaataacgaaatattttcttccccaaatttttgagacagatggattttccggaaagatgtgtttagcttttaatcctgtggttttgtgtaccacctggcacactagagtgttgctctaattcagtgagttgtaactctgggtgaacagtggaaatactagggtacattttaaaaatgctaatgctcgggcctcgctgaagaccaaattaattggaatctctgngggnggnattgatctttttataatctttctanangattctaatgggcttccagggatgaaaaccnctgntggagctnggaaccttcctttagtttggagaaaccccgatgagggtntnttaggcnccgcctntttttggcctgggcttccccccttatnntnttttggaanggnccnaattttt

SEQ ID NO: 620 - DNA, 339 bp, Homo sapien
  misc_feature (1)...(339): n = A,T,C or G
gngcgggcctcnccgtgcttgctctcgctgccgacgctctttttccaccagctgtagganaagcccgaagaccactggtcccccgggtagcccaagtaccactggtcctcctggctcctgacgctncgggtcttcctcgtggcgtagactgccagcttcggagacccctcagcccctccccgcttttctccaccccaggaggccatcagtagcgagctactgcctcggccacaacctcccagcangatagcccgcggtttccaatctgcgaaaggaggaccgccnagcccgaaatgccnagcccagcnatcactgccacgccgagccnagcgctcgtgc

SEQ ID NO: 621 - DNA, 267 bp, Homo sapien
  misc_feature (1)...(267): n = A,T,C or G
ggggngcatggtcccnggtagccaagtacatggtcctcctggctcctgacgctacgggtcttcctcgtggcgtagactgccagcttcggagacccctcagcccctccccgcttttctccaccccaggaggccatcagtagcgagctactgcctcggccacaacctcccagcaggatngcccgcggtttccaatctgcgaaaggaggaccgccnagccagaaatgccnagccnagcgatcactgccacgccnagccnagcgctcgtgc

SEQ ID NO: 622 - DNA, 847 bp, Homo sapien
  misc_feature (1)...(847): n = A,T,C or G
cttangntgtcgactgacgtcatgcatganttaaagcagaggtttggtgaaatttatgaaaaatacaaaattccggcttgtcctgaggaagagccactacttgataactctacaagaggaacagatgtgaaggatattccctttaatttgacaaataacatacctggttgtgaggaagaagatgcatctgaaatatctgtctcagtggtattcgagacatttcctgaacaaaaagaacccagtctcaaaaatatcatccatccatactatcatccgtactctgggtcccaggaacatgtttgccagtcatcttctaagcttcatttacatgaaaataaattagactgcgacaatgataacaaactaggcattggacatatttttagtacagataacaactttcataatgatgcaagcactaagaaagcaaggaacccagaagtggttacggttgaaatgaaagaagaccaagagtttgatttgcaaatgacaaaaaatatgaaccaaaatagtgacagtggcagtacaaataactataaaagcctgaaacctaaattagaaaatctgagttctttaccaccagattctgacagaacatcaggaagtatatctacatgaagaattacagcaagacatgccaaaagtttaagaatgangtcaacacattagaaanaaganttctgggctttgaagaaagaaaatgttccacttcataaagaaggttgaaagaagaatgggagagcccngaantttttgcccngaaattttcgggaaccctactggatgggtcnactggttggccatgaatgaataatggactaatcnnccaattcctngggaagggaat

SEQ ID NO: 623 - DNA, 681 bp, Homo sapien
  misc_feature (1)...(681): n = A,T,C or G
aaaactgtactcgcgcgctgcatgtcgacactagtggatccaaagaatcggcacgagcgaaaangctcangcagcccggctggccgccgccgctcctccccccaggaaagccaangtggangctgatgtggctgcangagctcgtttcacagcccctcangtgganctggttgggccgcggctgccangggcggaagtgggtgtccccangtctcagccccaaggctgcccctcacaaagcactggtggtttgcctccactgccaccttgggctccgaacccgctcccctgctgtggangcccaccgtgggaatccaggtccccaggtggactgcctgccttgccctcactgcccactctgcccacacttccctgcctaganaccgggaaggggctgtgtcggtantggtgcccacctggatgtggcagcaccgactgtgggggtggacctggccttgccgggtgcaaaagtgggggcccngggaaaagcacctgaagtggccctgaaaaatccccccttaattttnccccaatttggggctcnaacaaaaggaaattgctgaagccaanggtaccaaggtcacccctaaggccagggtgaaaaggtcccaaaattccaatncccaccntttgggcttncctcttggaaccccggccccctctcntgaanttttaaaaaan

SEQ ID NO: 624 - DNA, 661 bp, Homo sapien
  misc_feature (1)...(661): n = A,T,C or G
attggtcttactgtaccaccgggtggaaatcgatggccgcggcgtctaaatatccgattttttttttttttcctcttctgactgtccatggacaaatgaaactaacttaatctaactaaaaaacacaactatattttgaagattttctatctgcactcaaggacactttccacncggttgttgttaccttttggtcttgtctctgaacatgaaattnatctcaagggattngatttctggacctcctattcctgctatgggtttgatatttcttgggctccagggccactgttgcattgggntgacagntacctcctagcccatancctcctatcttgggaaacaaacctaacaactacgtgtaccttccatagatctctgattgagtctcagtatncgcttgctcatgggcgattcacttgaatccgtnattggtgccaacaatcctgactcatgggnnaatggatcctatcacgttcccctgattngcaacccctgtatacatanatctaatcgcatagaatctagcntnggntatgcgcggctacgctatcagggnttgntaactatngcatggctacgaancctgatcatgatcnagggtcatggactcttatcaggggggttgggccgngcttctttttcnnaccttggtaaaacc

SEQ ID NO: 625 - DNA, 181 bp, Homo sapien
gcaacaatcagatcatgttaaagtaaatctccattgccctggatcacttcaggatttaattgtccaaggagagcagggttctcctgtgaaaaaaaggtggggaaatgtttgagagtaaaaaatacaaaattcaaccggtcgaaaatacaccactccattcagtgctctacccccataagcc

SEQ ID NO: 626 - DNA, 181 bp, Homo sapien; identical to SEQ ID NO: 625

SEQ ID NO: 627 - DNA, 813 bp, Homo sapien
  misc_feature (1)...(813): n = A,T,C or G
accaagctggagctcgcgcgcctgcaggtcgacactagtggatccaaagtgaacgtgaaggtgagcagaggagaacttgcgatggcaaagttaaaaacaagaggagatgatggtcttggtgtggcacaggatgttaaaaaaattctcctgtccttaaggagttactgctatttgagtaatgtgccacttccctacatagccttctatgcagaaatgctatatttccacttcacaacccagaacgtgcattttattttacatttagaggaggaacaaacaaccagaaggcaaaaactggtgcattattttttgcaattctcttggaaagagttcgtttttaacttctgctcagacagcacacaactactgggaatatattttaatttcaaatctgatgtgtgacatctggtaactcatttattgctaatgaagttttcacaggaagcagcagtcaccagtagctcatcttatttttcagttggcaaagtgttgtttaccttttattggcctgcatcggtgtctcttatcacaggatatttaattagaaaacgcaagtagcctaacatagaanagaaatggagtggtagataatagtagatagaatggctaaatatttttattacagtgatgtaatatcactgnaatttatggttaaaaattatgtaatactcaaaaggaattctcagactggcgaaacagctggncaacagctntcacagggctttnanctcctnttgagctttccccctgntggactttagtcttccttttacncccgnagttnccattnnttaccaattgtnccgggaaana

SEQ ID NO: 628 - DNA, 646 bp, Homo sapien
  misc_feature (1)...(646): n = A,T,C or G
tttgggnggnggtgtctcntttgggtggactttttgggtcgtagggccccaaggccgttaatcccgtaataacggaagacgaagaagagtcagaagagtgcttctataaggatcgggacgagactaccttagaggaataaaggaaaaaagcagaggaggaagagtggtagaaggagtcagaagaaacccacacgtcgttctgaacctggagccttatcaaaaaggtctagataaacgatagcgatctcgatatcgagctcaagaggtaggtttagagacttctcgtcctcgagagcgaaatggaagatctcgacgacgataagaagttaaagtgtagagggtgcttgaggagcgcgtggaaggattctgcggagggacccatcgacgtagagacttgaaggcctactaaggtccacaagaagcccggctctttctccgaatggtcggagcgtacagtatgcgacgtcgatcggcagacaagctggcggtagactcgaagtgttcgggcgaatcgacttataatagtcgcgcgctagtaacgtaggaacacgaagagtagtcgaaagaaaacgtttagtgagggaaaagattagggaaaaaggagaggcttaataactaagacacttggagcctaggccaacgcgaa

SEQ ID NO: 629 - DNA, 617 bp, Homo sapien
  misc_feature (1)...(617): n = A,T,C or G
gcccccncccccctcctngggcttatngggacagacccacgtagtactctaaatcttctcctacgccggacaacggaccctataccaattcgaatcttggacactccgaccgccggattctcttcccctttcggcttcccctttctgtcggtacccctccctagtcgtctcctacaccttcgtaccgtcgatatatagtcgccgcggactagcctatttaggtgtcctagactcgttattgatccactcattagtctagtactatgcgtcacgtatcttagttgcctaagagggagattaaatcctccacaagttccgacgaattcctggactctcgtactagcaaactttcttatgaggcttccttgtatatcttctggatgtttctcgtgtcccggtcctccgctactactagagctccttgccctatctctagaagtagaggactctcgggttcgttctccaaatctagcgctagagctatcgctacccgctcgattcccccagcggaatcttgaaacctgaggtagtacacaaaccctccncatcttccctcggttgctccttcttctcatccccccttcccgccttctcgggaangaatctactttancttc

SEQ ID NO: 630 - DNA, 644 bp, Homo sapien
  misc_feature (1)...(644): n = A,T,C or G
cnntcggcntgggttttnttctgagnnncccccccccccccccccccaaacttacacccaccaaacactttccgccccctacctaggagacattagaagggtttaggcttcggcgtatagtaaagtcctctacctcggaagtagagaattcggtatttaaattcagggttagaggctcgctcgttagatttatagtttaggtttagaatcggaaaccttcgatcttccttagaagggtaataagtgaggccctaaatccgtctaaccaaggcgttaaggtccgtacctaaacctagtcttatcttctatcaggcgcaccaatataggtaggttctactttcgtataggccttaaggaatagttcggtagttatcgaaggcactcctctctaggctaggcttttctcagtcttagtactccgggaccgtcgtcgcanaaatatcgatggacggtaggtatctccgcgttacgcgtcgggctagggatatagagcgaattatcggcgagaggcggtcgctangaatcggtatcaatatgntgttctttaccctacggatatcggcagaaaacataaaaccttctnaccanggataagggattatcggacccctaaaataacagtaacatttagantactagtaccc

SEQ ID NO: 631 - DNA, 526 bp, Homo sapien
  misc_feature (1)...(526): n = A,T,C or G
ccntcggcttgggtttttttctgagccccccccccccccccccccccccccccccccggccccatagccccaccggncccacccaaattttaacaaaataaatntacctatcgntcacctatcccncgtatcgngtaggtcggtaccggtaccggngatcncnacgattnttcgggtcgtcncccttaanacggncccgtagccnccggaanaaatactacgagngactctaatntagcaanacccgccgtcnattantagcatccttagtcttccaatgncgnggattnngaatccttnnaagttatcgggtagaacgggtcccggtcccccgccctctttncaattaacgccgggtacaaantcggtttctaaattccncacgaatttngncggcaacattcncgggnccttattanccntttccaaccccgatacncnagctcgatcgggctttancgaatccggggtcncccccgangantccgggtcctttgagtngctctaggacggttacgacggagga

SEQ ID NO: 632 - DNA, 647 bp, Homo sapien
  misc_feature (1)...(647): n = A,T,C or G
tttgggnggcgggngctcatttgggtggactttttgggtcgtaggaacctggtatgaggggtgttttgagtttcttcttcgtcgtctctgggaggttcggtttcgattgagattcgggttcgtctttatcttacgaggcaccctgatattgttgcgctttggtttggttgtggagagttttgtcctactctagcgggtcatgcggatgatatgtagcctgcgtggcctgatagtgatgttgtgagcttgagaggggagttgtgggtgttgcgggcggagtaggaggggttggagcaccgggattgggagatatagaatcataagtgttaggtataggtcgattgagcgagttcgtggaattcgtgtggtcatcataattagagtgaggatgggctctatatttcttagaggacgcacggtcgtgattcggggtttgatgggtgttcttcttgtgggcacgattagcttgttcatgatggtaaggaccatactgtttcgaatgaggattcgtgtcttcggattgttgtggatattgtggnctanactatttagtgtaagccggaggtggtttgccgtggtggagtatccgannttcattcgganggtatgcgtgcggagcggtccttgtagacattccggaaaaatgg

SEQ ID NO: 633 - DNA, 630 bp, Homo sapien
  misc_feature (1)...(630): n = A,T,C or G
tccttcggcttgggtttttttctgacccccccccccccccccccctcggaaggcctctaggctcccacccgtctctctaatcctcaggaaccgatccacccaaccaacttactaatgtcctacagtaaacacccgagaatataaacccacacctaggcctccaatcctaccagggaagcaagaagccgtagtctagcgtattacgaacccgagatagagacggagatacttagttttattctctcggaataggaaagacgactggggagggaatataggctagcgcggggataggggctatggcggatatgggggcgggtcgctctcttattcttctataccacgtcaataggaatgtagatatacctagatgttcccgtagaaagagacgttagaggtctccgaagctataaaggagaggcgcgaagaaacttcgtactctagctttatataggtagtcgctctagtcccataagcgacgagagatctactagatttcggtatcgccgtcgtatgtattcgaaatagtcttcttccccttttcgatctcctctctatactacatggngattatagtcntaagatagtcaggatattaggatattagttatatgacgttcgacgggacgg

SEQ ID NO: 634 - DNA, 647 bp, Homo sapien
  misc_feature (1)...(647): n = A,T,C or G
ccntcggcttgggtttttttctgacccccccccccccccccctccactaagancttaacccaaccctatagtttactcgtataggggaatcgaggagaaataggaacgaagagcgggtgataaagagaaagtactttcctttatatgttaagagcttagcgtaatgactttcgttatatggctagttgattttatccggcgttatagggcttagttctggttatctcgggtctaattcccttagtatgctcgggagtttaacgaggtcacgggatagcgcgtaccctttctaaggttcttggaaagctattcgttatttatcgcgattctcgaggtcgaaaggatcaaggatcttcccttttactaccctagtcgggttagcggtcggtcaaaactagtgtagtacctttacctcctcgaaagttatagtcgaaacaacgtattagtcgaaattatagcggatagatcgagacggttctttctcgggttctcagccggtaatccctctatttgggggtcttctccctcttcccctttgtcttccgccttagcttccaaggttcctcggaagcgaggggttctacttaagtcgntagcgttccttataaaccncctacaggcagacccccttgtaaacggctcggggt

SEQ ID NO: 635 - DNA, 645 bp, Homo sapien
  misc_feature (1)...(645): n = A,T,C or G
ccttcggcttgggtttttttctgagccccccccccccccccccgaaactcgccttaccctagatacccaaagaatagttccactcaacttcgtctaagtaaaactctagaacttccaaacataaaagacttcgcgcggttagctacacagcctacgggaatctcacgaatcccgattcaagtcccactctcgaccacaccccggtatcgtcgttttcccataccaatgtcgaaaaataaaataaaatccagtcaagccccacggtaagcgggggtagggctaggcgaagaggcaggaaccgttcgaggccgggggctttcaaaatacaaaacaactacttaaagtttaccccttctaaagtcgggggcaacggttaaagcacgcctctaaagtactactcgtttcgagaaggggtagtcatctcccgcatagagactctcgcgtatatcaactcgcatcgcttctagcattccgacggtcgcccgcggctacatatcttgcggattagctccgagggactatagggttaattagtctagtaaattctcttagaggatagtcggggtcgtagttaggcagtacgaggggacatggnctgcgtcgtgctctaccttgacagcatactcttataaacatctttttcct

SEQ ID NO: 636 - DNA, 643 bp, Homo sapien
  misc_feature (1)...(643): n = A,T,C or G
ccttcggcttgggtttttttctgacccccccccccccccccctagcggaaaacaatccccaccgagattttattaatcgtaaaactcgccttcggtaccaagtcttcctccttcccgtaacctggctccctcctagnggctttacgaacgtccctcctcttcttacggctcggaagtggttacggttaaatccggaggnggggctaacgaatccaaggctaactcctcttanagtttgttgtccncncgtttagtaaggatccgtggagggcgagtatttgncccccggcctttattntatagttccctagtacgataaagntaccggctatcctattacagcggataaaagttatttanagggccgacgtcnccgctagacaggctacagctagnggaggtaccgcctccgactantccgttgnttccgacaaggnagtttcggttaactccacaaactcctccgccgactctanggtggggacggcagttcccncgtttagtgtgcgttatagagaagggcatttgagttggacgttacnttttaacataggttattccgtttaggttcttgcgggcccgtgggggtagtncnccggcgcgttnntatcggcgattttccgcagtttccgtttccggntnt

SEQ ID NO: 637 - DNA, 631 bp, Homo sapien
  misc_feature (1)...(631): n = A,T,C or G
gggttntctcatttgggtggactttttgggtcgtaggaaccggtatgnaggagtaggagtcgctgggaagactagaagttagctacggacgattagtgtgattccactcttaataacgagtaatcgtttacgtcgggttggtgtttcggggttttggagagtaagcgtagttgtggagtttcgcatataggtccccttacttcggcgatctcgtcttctgtcggttaggttattattgttcatccttcgcattagtagtagggttggtcggataaatcgatagctattctttagaattcgtagtcggagaattcgtgtacgaagtcctttaagttctttaagttcgcgagtaagacgtgtacggttattttgtcgtcgacgtaggtgtcgtttacgggagtttcgttttaggggtttacgtagaacgttattaagcacggtaatacgatagaggattacgcgacgtattcgtcttagaacgtcgatttttcgaaggcgcatttgttatcgaaggggagtccttggagaatcgagatattccaagaatattacggagattacagatcggaaggctcccgagatcggacgtattaccggtctcgcccgaaacgagtaggtatcntccggataa

SEQ ID NO: 638 - DNA, 606 bp, Homo sapien
  misc_feature (1)...(606): n = A,T,C or G
ccccccccccctcaaccatcnattccccacctcaacgcgaattacggtttcgaaagtcgacaataagtccggtcgagtagagggaatcaggggctggtanaaaggaccacgggcggaaaataccggtctccttccggggagcgacgtcggggaaagggaagagagcggtctagttcgtaggcaaacaggtcagaaaagttaaggttaaaggtcggaggggagaggatagctagtacgcttagttcggggctcgggcgcagggccactttcctctttcgcgttcctttactctgcttacgagttcaggctccggagttccgcgccggaggtcgtcgcgacgctaggaatggggactcgctcagtccccggttatccttcgggattctatgttttcgccgatagacggagaccgggtagtagggttccgtcgtaccgccactcgtcgccttgatccggcccgctccgcttaagggcgatgaaagattaggtattagggctctacgggacgaggcatagggcgggagaaggggggaggggtcgggggtcgaagggantaagaaatcgcantcgcgcggggtcggtagganccgaaatttttctcnncgt

SEQ ID NO: 639 - DNA, 592 bp, Homo sapien
  misc_feature (1)...(592): n = A,T,C or G
tccntcggcttgggtttttttctgagcccccccccccccccccccgggaacgagaaaacaatcccaccctaccgcggggagtgggttgnacgcttagttctagaatcctcggaatcgtcctccggcgttggtagttccggcgattccgagtatgccgaagtgtatcgctccgtctagaggttggtatctgtttatcgcgatgacgctattgactcggatgctttcgaagtagggggataggcgcatagatacgcctccgcggtgtcctctgaagtggccgcatccgtggacgcagcgtagacagctctggtggacgataacggcttctcgtactcctactccggctattatgttagagaggacttgtttctgaacggatataccattagcgaaggggtaccctccgctaacgcaggcgtttctaacagttcttccgggcgctccgaatttagattgacgcctccgcagcattgtgggatcctcttccgttagccctctttataggatttctcctccgccccgaaaganggctggtcgtccccggcangtatgtctagctcgaacgctttgttactcctttgttttcgaaana

SEQ ID NO: 640 - DNA, 637 bp, Homo sapien
  misc_feature (1)...(637): n = A,T,C or G
ctttgtggcggtggntgtctcatttgggtggactttttgggtcgtaggcttatccgggtngggctcccgaagtagcttaggatcgccggctagttccggtcccgcccgtcgaaagcgcggttcggcgggcggccccgcgttcgttcgcgggctttaccctcatagagtgccaggtctcggttcttacgggttcgtcggcgatagattttacggcgagaggtcggtatcttcgccgctttacgttcggtcggcatctacgcctagttcacaggtagtttatgcgccggagcgcgtgacggagaggttatacgggacgcggaagaaccgcctccaaatgactagtacaggctcgttcgggcgtagatctcctcgctcggtcggcggttcttacttctagggccgctctacggtttaaggcggtcgttagatcttagaaactatactcaagtttcagtcggaagaaaggaagtagagagaagggtaaacgattacctccggttctagccctttttactcgcataacgggagaacggggtccggctctcagatacgcctcgcgagacgtcgcgattcaactttaacctccgctagggcatccgtatacggttaacgcggtaaaagcgacctcggaaacctc

SEQ ID NO: 641 - DNA, 649 bp, Homo sapien
  misc_feature (1)...(649): n = A,T,C or G
ctntgtggcggtggttgtctcagtttgggtggatttttgggtcgtaggnaacctggtatgaggtctagtttcttcaacgattcttggttcagttacgcgaccctatccttatcttacaatgtcttctacatcaggttcatcaattaatatatcaattacacattaacgacggtgtgacgcaatatgagaaagtatacattaaggttattatatattattcgcttaaaaaggttcctgacatgggacaacttcacccaccattctagaagccccccctcctgtaggaccccctcgagttccccattatcttagttcagttttcattttttaaccaggagggtatcggtttttaataggtactattttgtcaaacttttcagaagctttatcttcaaatatacttgcaccatctgtactaggagcactaactattcgagtctattacagctcaacagaaaataattgaaattaaacaacctaagtatcgtccaccataaccccatcgggctctcaccccatttcttcataagttctagagcatcctgagctctttcctattacccttgatggtactcatggtctaataccccccgcagttataggtccttatggatcctatgctaccaccggtctaatcccttctatcacn

SEQ ID NO: 642 - DNA, 645 bp, Homo sapien
  misc_feature (1)...(645): n = A,T,C or G
tccttcggcttgggttttttttcgtcgcgggttactattatcgattgttacttgtaaaggcgatactcccaccgctcacgatattagacctgctcctctagaagcgaacggcgataggtctactcggccggcgaagacggcgaacgggtaggaggagccatatgcaaccctaacggagattataagtactgggaaaaatactagtattaaggtagcgggttaagataggtggagagacactattcacgagcataagcacttagaaggtcttctcgaggagaggtaggctacggactacgttccttcttcctctagcctcgagagggagtatagatgattcgcaaaagagaatccctcctatacgctggcataactagacgacgcgtcgtcgggaaatctcgccaaccctattgcgacctccaaaaggaagattgtcgtttcatagaacgctaatactccgggtcttcccgaatcatagccgcatatcggtaagaagacggtaaaatcgcgcgattctaacaagattctgtagacttaaggctaagcactagaagcgatctcgattccggatcttaagatcatactaatagttcggtcacaccagacgacgattagccactagaagccctactccgtngaaaccgg

SEQ ID NO: 643 - DNA, 586 bp, Homo sapien
  misc_feature (1)...(586): n = A,T,C or G
ctttgtggcggcggtgtctcatttgggtggatttttgggtcgtaggaacctggtatgcagggtccgcccggaattaaaagcgggatccccaaaacgnngnttcgcaagaagagaagaatcatagcgataganctttcatagtacaaaggtaactaagaggaaaataatgcagattcagaactagttgccaaattagaactcgattaggccaaggatccgagcctggcgctatcacttcgggacttaagctacggtagagcagtcggtcctgaagcatagctcccgtaggacgtaggaaactagtccggcacggaggacatactctcgagtctcggaacgtctatttagaatataaacgcattaacctcagaaggcgccgacgcggttactctctagggaactatttcattccttccggagctcccctatttttccaacacatataccggcaaaggaaaatcttntgtcctcggtctaaagagagggaaaaaaaacgatatctaggttcgggtttatccatttaaaaanatngacgcgactactccctttcaaagggagtttccccctaggnagagttcaacngaag

SEQ ID NO: 644 - DNA, 646 bp, Homo sapien
  misc_feature (1)...(646): n = A,T,C or G
ctttgtggcggtggttgtctcatttgggtggcatttttgggtcgtaggaacctggtatngagggctatttgacttgtttctcaaatcccatggtatggtgggtggcgtgcggggtggcggtcggttcggcgggggtgggggtcgtcctccaaaggagttgctagagggcttttagtggttttagggcgggaaggggttagagcggagagacgtcgtcgtggaagcttctggcggagcgcgagaaggtagttagcgccggttcggaagattctcagaattcgagaagaggtagtggggcgcggagagagagtttctaagtctaaacgtagaggtcgtcctagtcgggccgggagtagcttttaagctagaggtcgaggtcctcgtttaggctccgggctcttcgggcagtatcctctttctcgaggaacggagcgaccgacgtcgtagccggacccgtctatccgtacgtttagagatacgctcacctccacgggcgtatatgcccgtatacgtataaacgcgtaatatactcgcgcgtaaaacacgtatacactatatacacgcatcgtacggaccgtatagcgttatacgcgcgcgtatattaatttacacttatatacgcgttaacacgatatatcacacnccg

SEQ ID NO: 645 - DNA, 654 bp, Homo sapien
  misc_feature (1)...(654): n = A,T,C or G
nccntcggcttgggtttttttctgaccccccccccccccccccccggtcgacaacgtgcccaccgttgccatcccagcatagctggttcgttctgttttattcttagtagtttagttcgcctatagtccctcgtctatcgtctatcatttaaggaggcggggctcgctctttagggcgggtatcttaggtattcttctggtttcggctgccgtctcggagtctggtccttttgctttcctttcttggtcgaacttcgtgtttgatcgcgttgtttctttggggtcgtcatacctaagggccacttcgccaacaaacaagtttgtgtagtcgtttctattagggttcgctggccggcgctcttactggttggcgatttttaacgcgtttggttttaatttgcttcctcccctagggctcgctcggtcttctctctgttcgctgctctcgtccggcctttggtgcggggatagctccggctattancgtgccgtgtccgtgtggnttttgtccaatgtgaaggcctaggggtgcgggcttctttggccatggnttcccctcttgtganccttaggggtaacgantcgtaattnaaggtcgggggttggnatacgttntangggangcctgngtccgntattccttgttttggcctn

SEQ ID NO: 646 - DNA, 645 bp, Homo sapien
  misc_feature (1)...(645): n = A,T,C or G
tccttcggcttgggtttttttctgagcccccccccccccccccccacgccaagtacacagacccaccaaaaacaacgtcaacacaacttcgggtatacggaccttaagagagaccccgtagtagaccctaccacagccatccaatagtcaaacaacaagggcgcacccaatccatccatagagctatcaaacaacggaggggaaaggaaagagcagggtcaacttagcagagatcgaagtcggcactaattcctttcaagtactcgctcggcttgtagttcggggtaaagtccgctctcaaagggccaacgaggttttaaagcgacccccgtatcgagtcttcttcgtattcattaaggcgttaaaggtacgagacctagaagagagtagaattagcccaccaaatcgcctaaaccggcaaaaacgaccaaaagtcaaagacccttacaaatatcaccttaaaacgccaaccccaaaaacgcgatcagtaacgcacgtacctttcccacgcttttctttctttcactctccaaaacaaacccgaatatttagcgcaaaaaatatccgagggagaattagaagctattacccgaaaaaaaancggananggantaaatngtggggaatanacgtttggtttttctg

SEQ ID NO: 647 - DNA, 753 bp, Homo sapien
  misc_feature (1)...(753): n = A,T,C or G
accttacctggtaccgggccccccctcgagtttttttttttccaaatacaactcagattgtatacgaaaagctgataatacattgacttttgctgtttaaatcccttgagcctttgataatgattttttttgtgttaacaattgtagtatataaaatcggattcaccatccttctgatgccatattgattagtttgattttatggtgatgggatcattgtgtgttaactgtattaagaagaaatggatttgattgactttgcatccatttttatctgtgttactttcatgttttatttaaaagcatttctggaccagaataagttaagtggtataatttgctttttacacgtttatataattgaagttagcaatgtggcaaaatctctaatggaaataaaatgcttcagaatgatgacataaatctgagctatttcttgcctggagaacaagtgttattcataataatttaatagcttctgaggtgttttgttcatgtgatgaaggcttatccaccttgtatcaattcatgggctctgctttgtttaatgtagtcaggttgttaatacnagacttaagagtcatcctactgtgataagtggtgagtgaagattacatgtcttangaaaattatactgggaatatctctgacattaatgggtttaaatgttttaaggctaggggatgatgcaatgganaanatncttccaaangtttctggttgtttatatttgnggaagncatnaaganaccg

SEQ ID NO: 648 - DNA, 383 bp, Homo sapien
  misc_feature (1)...(383): n = A,T,C or G
gatatcccggggaaatgcggaggcctttnggcttacgtgtttaccgcgtagggcaaagccttgncaaattcccggccagcggagcggcgagggtggggactcacgggaagttaaacagcctcgtcggcgtcctcgaggctccaaaaccaggctctaggcggggacgactgcagccgttatggaggccaccgcggctacggccgcggctgaggcctccccaggtggagcggtggcctggaggggaatcttgatcctgggccagccacctgtcaagaggaggcggagcgtcatgcctctggaagactggatgaatattctccaggagcctgacgaaggcgaagaagtctttgcagaggaaattgaatgctgtctgatgctacaat

SEQ ID NO: 649 - DNA, 349 bp, Homo sapien
  misc_feature (1)...(349): n = A,T,C or G
cgattgtntacnagtcttagagtaagcttaagntcgntaccgagctcggatccactagtccagtgtggtgggaattccattgtgttgggtcactagtaaatggatttagctagacanagganatttaccctattccatttagcacagtgagganaggctanacagctaggatgcaataaaaaaaattttaatgagaaatgtgtgtggtagattaattctattaatctcaagttatagattaaaaaatttaagtaccncataaatgccatttgcctttgctaangntacatttttatgaanaangaccntgcatacnnaatganatactggactttnggnacttgangga

SEQ ID NO: 650 - DNA, 306 bp, Homo sapien
  misc_feature (1)...(306): n = A,T,C or G
cattgtgttgggagcatccttccatcagctcccatgagaaattctctgttgggtttaagcaatccccaaatatatcatattgacatgaatatatcatctcctcaatgtccagcattagcagacaagatgagtgctgaagatgatataactcctacctcttatgtaggctagaggtaaagtctggctctgctgactgtggggacataccgaaaaggaatgtgggttaatatcagangacctccctgcagatccganantcagggnctggactttctggganaggaagcnnaaagttatntctgaacc

SEQ ID NO: 651 - DNA, 769 bp, Homo sapien
  misc_feature (1)...(769): n = A,T,C or G
cattgtgttgggcagggtcatttctaaggcatgggctggaagcttttatttaaaactttacatgtcttagaagcactctggttgttgctaggcagacaattttacatctcttgctataccagttgcatgaagttcatcatgcatattggctgtggaaaaccttaacagcatcatgtcataaggtttcagtaaggtttaaatgaaatcatgtattaagcacttagtatagtgcaccttaaatgttagcttcaaaacaatgacaacctaactaatgttgaaagaagcttgtgtttgtaaattatgtcttattgaaagatgtcatcaaatcctgttatttctaatcccttaaagtctctcaatgtatttctttttgccatatccaatgacaggaccttagtttaagccagtggttctctcaacttctaatccagagatacctgggtgtccccaagaccttttcagagcatccttgatgtcaaaaccattttcataataatattaaaatattatttgctcattgtactcttattctctcccaaatattcagcgagttttccagaagctatataacatgtggtaacatcttatcactctgacgattaatagaatatgngnttttggattcttgngtttaaaattttctcactttggggttctaatatggnnacgattaatagatatggnctccatgaccaganggctttaaagcantcaataatttttaagagactaagnactatcctttaaagatngngaactccatcttaat

SEQ ID NO: 652 - DNA, 267 bp, Homo sapien
  misc_feature (1)...(267): n = A,T,C or G
nnangccctttaaccattgnggcctccacgcnntggcggccgctctacaactagnggatccgcnactctagnanaangattggctcttntgggntgggccggncgggctggggcgttaagcggggctgggcgcgcgccgnggttgnacnaggcgccgccgcccncacacncccggagcaccctcnttgcngccntnccccgctcaccccgcgcgcgccgntccgctttttccncacccanagcnctntttatctntgtctcctccgg

SEQ ID NO: 653 - DNA, 501 bp, Homo sapien
  misc_feature (1)...(501): n = A,T,C or G
cccnttnacccattgctggactccaccgcggtggcggccgctctanaactagtgggatccttncnatgagatgngcganggaggacnnatttgctatnctggatggggctgantcntntagctnctctagcancagatgggttatcgaggaagatgactccaangggctanantcctatgcncatcctaaaanncanctgctgtnttcagagtacgcgacacatcatcnctnatgcattgntgancaagacgggcangtgcttatcctcagcgangatgcccttaaccangagctcgaatggacntatcaccntanaggtacanntnccgcaccacacaccngcttgcnncctgacgctggactggatcncttaggccaccaatnccccgtttnccacatncctgggacnctananatactcganggggggcccggtanccaattcgccctaatactgagccttgntacgnacgctnactnggngtcctattanaacgttg

SEQ ID NO: 654 - DNA, 710 bp, Homo sapien
  misc_feature (1)...(710): n = A,T,C or G
gcgnctttancncatgctgggctccacgcggtggcggccgctctacactagtggatcccaacactgagtccaccacagnaaaactcancaccaggcagaccccacaactgcagaatccaggctgcaattcacagactaatcntctagacccacctcagtaccagatggtaccacacagctcaaggntttaggtttgcgtggtanactcaatctctatctttcaccactgccagcctgacttcagagatcctgngctctggacagtcctcagtggcaggcaactctcaggagcctcaggnttttggcacatcccagnaccagccagctgccacaggccctgaccttntancaacactgcccatgtattccagacttctancataccacagtgccatgctgattgcatctatagangctcaggtgcncctcaaanctgtgcctgctgcagnangccccacgtctctggcatgccccaatgccatgngtggnaacanttgacttctgggcatgntggaattccctaccactgancctgaccataggngggancccatttttttcgaggggggggcccggcccccaattccnccntatagngagncgtanttacgcgcnncttactnggccngtngtttaacaacgtcnntganctggggaaaacccctggnngcnacccaaattaaacngcnttgcannacatccccctttcg

SEQ ID NO: 655 - DNA, 202 bp, Homo sapien
  misc_feature (1)...(202): n = A,T,C or G
cccctttnccctttcancccccccgttttggcngccgccnacacctactncatccacccacantcgaccacccgagcttttttccgatcccancatcnatgcngattttntctntgcntgctgngcctgcacctttgntaggtcaagcctggcccatcttcgacaacttcctcatcaccaacgatgaggcatactctgacga

SEQ ID NO: 656 - DNA, 308 bp, Homo sapien
  misc_feature (1)...(308): n = A,T,C or G
gctgntgaaagaccacaccgaaaaactctnctttccgacttccacatgatgatcngcatgtggtggtgagagacttatcatgacgacatcgcttccnaccatcgcanccnctgcccaagcccattcatggaggcctgggnanttctgtgantgacntngacnctanacnctnccactgtntgctatccagacttgnttngaatatnttattggcnaaanacanttncggaatgctgtgnttgnncattgaangatctgatcactatgagagggtgaggacnncctgctngctggcantntntaacccn

SEQ ID NO: 657 - DNA, 696 bp, Homo sapien
  misc_feature (1)...(696): n = A,T,C or G
accntttccacaatnctgnnctccccgcggtggcggccgcgtcgaccagcaacctcagctgtgggtcttgttacagtaatgagttactgtaaggaaagtgtgacatttcgagcaatttgatttgtttaaaaactagagcagtttcagggttttccttgtaaatctgtcttatgtgtcttcaatgttctttcttgaggagtagagaaaggaattgttaggaatgatgcataaaccatggcttattttatctcgctgccacccataatcagagcagattcttgggactatgaccctcatggagacatgacaattgtgtgtgtggtgggtgggagaaaagagctgggaatttttagggtctagagggtccaatcaggactattttatggagctctgctcaccaactttaagtgagcaccaggggtgngaaagcgaatcttgggntcaaaanaacaatggnaaggggtaagttggtatnctgaactggccacttcggactcttatttaactgggtattctcanttaaggaggcnngggtggtcttggcttgtnaaggaaagcctgtgcaatggaatgactttaaaaccccccattaaaaaaaaaangntataaatcttgggtcttaanaangaagcctgggttctnttancccattttncccccgggaaggnaaatnttcttaggnaanggaagggaagg

SEQ ID NO: 658 - DNA, 698 bp, Homo sapien
  misc_feature (1)...(698): n = A,T,C or G
ctggactccccgcggtggcggccgctctagaactagtggatccgtgttggctcaattctcaaggctgttgctgtgcggcctgttccccacacgtgctgctcagctcaggcaagcaccgagcttgtgttgtttcatgctcagcgtggaggcccctcctccaggtcgctgctctgtggggttcccatacactcaggctcctaggaggagtccatttagaaagccagggtttttctcagagtcttagttccttgtgctgtcatccatttcacacgacttgggccctgctcggggcaacacagcaagagaaaagacagggaaaataagagagggaccttgcacacacacgctctggaccacagagccctgtgcccagctcctctgtcaatacaggtggaatctcgtgcaggatcgcaggggtctgtgatgccaccaaagagcaggccgggacagggttaggagagaaaggagagggaagtgggggtttctcctacgcactcttatttgcagagggaaaggcgggtttgtattggggttgtcggtctttgcacccacngcacagttgtgagacacccccatcctnagatcaaagccccacatacagcttggggaaaaacaaaacnaaacaaaacaaaaacagtaaacctccatgccanttgttgggnaagttttnaatttncttccccnacccancttgcttc

SEQ ID NO: 659 - DNA, 750 bp, Homo sapien
  misc_feature (1)...(750): n = A,T,C or G
ncaanctggnctccaccgcggtggcggccgctctagactagtggatcctcctcatgggcctggatatctctgaacatatgatgaacattgcttatgaaaaattatttgtangaaaattgtgaggcctaagaatgntattttcttttagtgatggtctttgtttgcttctgtaaggnacttgtgggcactcgtaagcttggatctctttaatctaataccagntttgagattttcttggccccatagatgaattaaaactggcgtacttcttgtttacaaganggataagtctcctagggtaagtcttttggggtcccaagtcaaaaagatgagggatttaccagttctctaaccttggtagccccagactccaaactttgccttctagtcccaagaggctatcaaaaagcaaaggccatcttccaccttcttttccanaacagcacacattccagacagtacttgaaagcaggaacctccttatcccttaaaaacctcttggaancatcttccctctcttgcttctactatgcttggcccacctancattcncntttttctggaaaccggaaaaancttntgacttnngttggctacattcagcttggccccctacaatntggtttccatctgccctaangaaattttaaagggcactttttttntggcccctgactttcnntttttagggctttcccccangctttgcccctttggttaaaggggttattttccttccccttttggaag

SEQ ID NO: 660 - DNA, 849 bp, Homo sapien
  misc_feature (1)...(849): n = A,T,C or G
tcggatccactagtccagtgtggtggaattcgcggcccgcgtcgacgggcagtagtggtatgcntntctaaatgttataattatttcagaattactctgccagaaagttatgatcatacatagaagagtttgtagctaactttgaaagtagtggaaagtggttttcatgtattgtttgggttaatttaattttgattatatttggtttttagttcaggtaatttttttgttgaaaacttcaaatgacaatttcttcatggttactaaagatcactcatgtggagtagtttcagatttttttctgaatacatgtattacttttagagatgtaaagatgtgaaattactaagagagaaacccatgtgatttgtttagtggatcaaaagtcggtagctcctttgatcctaagtgccactgatagttaaatagatactgaagctatgggcaggctggattgataagaaaaaaggagacagagaaatgggaaattgggaaagaactgtgcaaataggaaaaggagagagcaacagaacagaattagtaccacagtgccgaagtgccacctcaggtacttccatctcccatctcctgaagaattcagtaacagtttgcaaatggtcaacacaatcatttagtgatcctggttgatattttcaatactttctggggatttcttggctggnttcaaaagatgatgctgatagttttattgcccctgaaggtattctgaagnttancataatttattggtcagtaaaatatttgaataaaagnggangaaggaaaatctggcntcttattttgggatntcngcngggggaangaggatataattnaccccggccttgg

SEQ ID NO: 661 - DNA, 653 bp, Homo sapien
  misc_feature (1)...(653): n = A,T,C or G
aacttaagcttggtaccgagctcggatccctagtccagtgtggtggaattcgcggccgcgtcgacctccattcgtttcttgtccttttttttcattttttctcatgttctattcactttaggtttctaagataaatattataaaataatttttacttataaattattcactgataccctgtctttaacatgtgaaatgaattcaaaaggaatcttaatgagaaataatatactcatgatgtttaatagatttgatttcgaaataataagccctctgaagtcctaagttaaaaataaagcaacttgtttgataatttttcatcaagaatgtatctgagtctctgagtaattattagtaggaatattccattatcacaattacacagtataagctatttagtctaactttaccaaaaaagggagctacttcaacactgtgtgagacttttaatgggtttgcattgggtatgcactattagcaagataacctattttacagcagtgtttnttaacctttcccatttatttgaaaggcagctaagatatagtagttaatntaangggctgatgcatttatattacatgtaganaatgggagatacnaaagggagngggggganatnttttgnattcnnaagcttcnttgncaattaa

SEQ ID NO: 662 - DNA, 646 bp, Homo sapien
  misc_feature (1)...(646): n = A,T,C or G
aaacttaagcttggtacccgagctcggatccctagtccagtgtggtggaattcgcggccgcgtcgacccagggacaggcagccagngctggggtcaccagggtcccctcttgggccctccaanagcaacagtactggcaacagctgggatttgctgagcacagactctgcagcaggctcggttgagctctctgtgcctgttccttcataccatcctcacgcccatccatgagatgggtccagctgttttcagatgagaaaatggcacaggaagctggtaagtgacagtcagaaatgaatgctggcagcttantccttggacccaccgcagtgcaggaccttgctcaacagggatcacccttgtccgccacctgttcatgaggccacccagggtttgtgtggtcatttgtctcctttcatctgcttgccttcaaccagctgggtcattagggctggggaacccagaccccacacagtccttctcccagangccagacacannctncgccacagnaaggacttcagtccccgaancaaatgtncctgggcgtanaaactgnagggnccccaatccctggtggggtactgctttgcactggnggaattcacccctcattgnnaacctttccctnttnncacccctaaac

SEQ ID NO: 663 - DNA, 650 bp, Homo sapien
  misc_feature (1)...(650): n = A,T,C or G
aacttaagcttggtacccgagctcggatccctagtccagtgtggtggaattcgcggccgcgtcgacgtcgacgcggcgngccgtttcgacgcagttgatacatattattatatactacatnggttttctagaattaaaaaattaatgtgtagtgccagccctagatgtaagttacatatatcaactctatccaattttgtcagccataaaacttacctttttcacatacttctaactctaacaatgtgagaaatgtagatcattgcaattatacccacaaggcagatggctacatgcagaatggatagcagaatctagctacttacgctagccacatggtagacgttttttcctttgtttttgcaaaattgcaatataagttgcatatcgttagagtgaaaagatgtaaagaacccatagaagccagtgatgaaggacatttatattttcacctttacaaangaccttaaaattgcctatgtggagcagaaactggaggagggcnaanccatcngtaaaaaaaattttgntnctatttggatttgggcaccattattacctccccaggtncctttttgntttaacctttcttttaaaaaaaataattcntaatttttgggcaaaaaaaaacaaggtttttatttaaattt

SEQ ID NO: 664 - DNA, 678 bp, Homo sapien; identical to SEQ ID NO: 605
  misc_feature (1)...(678): n = A,T,C or G

SEQ ID NO: 665 - DNA, 694 bp, Homo sapien; identical to SEQ ID NO: 604
  misc_feature (1)...(694): n = A,T,C or G

SEQ ID NO: 666 - DNA, 705 bp, Homo sapien
  misc_feature (1)...(705): n = A,T,C or G
tttaaaaatttagatacactangaaaattattttagtatcagaagaatatcagggggtgtagtactcatcagagctaaatgagagcgctttaaaaatgttagtttgtcttccgccatttctacagaaagctgcaatttcaggttttcaacctaataggtgatatttaagaaaaaaaaaaagcaatcgcaaatagccccactgcttttacaaatcattttttctcttctaggtatagcctgtcaggtggcctaatgtaatttttgacatctctaggaattttaatagaaccagaaatgggtgccagagatatgcctgcactaatcttaagtggggatttatgtatttctcaagcaagtgattaaagcaaaactaggcacgattgaaatcaagatcttttaggcaagaaagtcatgatgagttttanaattattttaggactctgtggctttctcttcatagaaatagaaaaaaaaattgtataaaaccacaaaaggtcctgaatagcccaagcaacactgaacaaaaagaacaaagcaggaagcaacacactaccagaattcaaattatactaccaaggtgtagtaaccaaaacagcattctattgggcntaaaatagaccnaagaccaatggaacagaataaagaacccaaaataaatccatatttttacagccagctnattatcaataaaaacnccaagaacnt

SEQ ID NO: 667 - DNA, 817 bp, Homo sapien; identical to SEQ ID NO: 603
  misc_feature (1)...(817): n = A,T,C or G

SEQ ID NO: 668 - DNA, 826 bp, Homo sapien; identical to SEQ ID NO: 602
  misc_feature (1)...(826): n = A,T,C or G

SEQ ID NO: 669 - DNA, 547 bp, Homo sapien; identical to SEQ ID NO: 601
  misc_feature (1)...(547): n = A,T,C or G

SEQ ID NO: 670 - DNA, 232 bp, Homo sapien; identical to SEQ ID NO: 600
  misc_feature (1)...(232): n = A,T,C or G

SEQ ID NO: 671 - DNA, 214 bp, Homo sapien
  misc_feature (1)...(214): n = A,T,C or G
ctccccttccntccttcgctactncncattttcnnaaatttntttcgcntatgnggaaaaacacccacattnttcanctcgcacagaacangnnggggtgtgtaaaatgaagggcttccncnctttctcttattnaanaacactnaaanagggangggctaaaacccgcgngatntctacnctatcgcgggcgcttttggngttggctagaaga

SEQ ID NO: 672 - DNA, 328 bp, Homo sapien
  misc_feature (1)...(328): n = A,T,C or G
ngancagcggngtttaaacgggcctctagactcgaggagacncctgttggatggtggatcacanntcgntactactatacaggacagagtatcggganctcttggntgttggngcctgccaaccactgctnctgttaactgcgtatctgaagggactcggactggcttcagaagaactaccggctcgaatgnaccatggatgattcncnctagttgaaaaaaaactcaggcacatgtattgccactgatgactagcgccagactnctctcggctctntaacgagcccacatgncngtgtgncncccgtgctgnctccagaagaggttc

SEQ ID NO: 673 - DNA, 223 bp, Homo sapien
  misc_feature (1)...(223): n = A,T,C or G
gggggcaaagctggctagcgtttaaacttaagcttggtaccgagctcggatcccnnagacattgtgcatgaaaatgcaaattgagtgtggtctatantgccatcntcacctnctgncngctcaaaacaacngctttctgctgcaatgggtagggctcctnacncacggtcgcnnacggaggccnncttatcctcntcggtnnggatccctngaagcatnttct

SEQ ID NO: 674 - DNA, 256 bp, Homo sapien
  misc_feature (1)...(256): n = A,T,C or G
gnggggtcntngatgagcgcgcgtaatacnatcactntcnggcgngntgggtaccgggccccccctcnaagcggccgccctttttttnttttttttcatnacatgataanntctttnttctaaacagaccacaccactanagttcctttnctttngtacggaattgagttaaagtagagnatacaatgcagggcttcnnctctatttcacattccaggntggttcngnatggatcggccctgcctctccgatgggt

SEQ ID NO: 675 - DNA, 439 bp, Homo sapien
  misc_feature (1)...(439): n = A,T,C or G
nnactagtccagtgtggtggaattccattgtgttgggcttgtatgggtttttttgtctagttntttgggaaatgttngtgttactatnttttggatatnatatatgatatgtatggcccttctatgggctcctcanacngaactcaaccattttccacaaaaccnattcctcctttcccttcatgactgagtggtgttggtactatccnggaaactgggacattgtccttcacatctntcccttanctgcctngtccnattgatgtctttgagctntganatgtctttgttaactntctcctncntctgtactgccggcanaattaagcaccatntgtcacaaaaagtattgcgttaccttcacgnatctgttngttnccatncttgctgcttctccngnggaaaataggctnttctggcaaccgaacngaanaaatac

SEQ ID NO: 676 - DNA, 587 bp, Homo sapien
  misc_feature (1)...(587): n = A,T,C or G
nggnggcctnattaagcgcgcgtaatacnactcactntggggcgaattgggtaccgggnccccctcaagttnatntgccnaacctctcttttggaataacaaaaggtttaacacatatgtcctcatagggacgcgctttcacacnttcctgacngcttcatanacntcattnctatttctcctcagnacaagttnaggcngaaggtgaggcanacnttataatttccatttcacaaatncggaaagtgaggctcaaagggnttaaaaaataacctgatacaantcatagagccggtntctggaanaagcaggagcaaagtccaggcatcctgatccaagctnggtccactgccttccactctggagaggcttcatctccgacaaaggaagggacntgagtggctgganaatctcatgggataaagacctcagnatttcatgctcctggaaatcccatgggttgaacaacaggtntttggcccgtggttctntccctttgnccatcttttaaccttggggtaaatgatggcntctntnagcnttttttttnaaagagatngaaattgaatgattattngctcattggg

SEQ ID NO: 677 - DNA, 444 bp, Homo sapien
  misc_feature (1)...(444): n = A,T,C or G
gtggggcatnattaagcgcgcgtaatacgactcactataggggcgaantgggtaccgggcccccctcgaagcggccgccctttttttttttttttactgtccaaactntctatngatntagttgaactgtncaacgatttcatgaaattctatacacanagccttcaggtccagagagtaaaacaaatttaaatttnttcaccanattgnagcagncanaagcatccnatnatatccgactacaatgaatnatatgctnanggtanctnatttacccactntggggtctttanggtctgtcacaaactattttcgtaaacatcnntttaaanttnggtgaatggacctaatnccagataantctatttnatntaccctagcatncctgtggctnactttncgggctgtgttggcntacttttaggagaaaattggtataaatnn

SEQ ID NO: 678 - DNA, 670 bp, Homo sapien
  misc_feature (1)...(670): n = A,T,C or G
actagtccagtgtggtggaattccattgtgttgggagcagtttaaaaaaaaaaaagacnaaatatacnactcttgatnaaacataaaggtacagtggtctatgaggaanagaaaaggtacctnaggatgcaaaantacctaccacatgggaaccgttngtccacactcattccnnanaaaaccgagtcctctcanttncacacgtgtacgtttcagttgggaagtgcttgccattactccnaagcctagaaccttcacgtcctgaaggttctggaaggtttttcagattgcttaaganacgcngcccttccatattcntctccactacccnggggaacggaacaaatggagctgcgacngggaagcgtcccttcccntccgaacgctttctttcaaacctgcctgccttccnggcgaatggaccggaaggtttnctngcttcctttcancccnaattacttcctgngttgaaaattggcctgttggtttgcaaatgcnggaatttgtttactttcntcatgtcctgtgttgnncnaaccggctcncttgttgcctccctttngaaaggttttcatcaggccccgccctttctcttntaanngtcctaatccggncnggaccactcggggaaaattttttcttttcgaaaagccgccccntccgtccggct

SEQ ID NO: 679 - DNA, 449 bp, Homo sapien
  misc_feature (1)...(449): n = A,T,C or G
actagtccagtgtggtggaattccattgtgttgggagtaggtctactacancctacttcccctatcatanaagancttancaacnttcatgatccccccctcntannccttttcctcanctgcntcctagtcctgtttgtcctnttcctaacantcntaaganagatnactaatnctactatctctnacctccggaanctacaanacgtctggaactattcngaccccatgcanccncatnctccatcgtcctcccagcccctncccttcctttacnttactnaacgaaggtcgacgatccctcccntacctcccnnnccattgggncccaanggnactggacctcacgantacaccnactacggggngactaagnctgnaactccttacatatntccccgttacccccngaacncagcgaacngcnacaccttggacntcaagaanta

SEQ ID NO: 680 - DNA, 670 bp, Homo sapien
  misc_feature (1)...(670): n = A,T,C or G
tttcngtgtggtggaattcgcggccgcgtcgacgagaaganggaggagganaaggagaaggagaagaaggagaanaaggaggagaaggagaagaaggagaagaaatcatcatcatcatcatccactgtctngcaactatttaagtttgcnantcccttgaaaacaggtacttttgtttcaatgtttgggaccactnctgacnatgannagaanaccaataaatgcttgatnaatgaaaaanccactttttacctgttagaaccctgaggctaagagaantgatgtgactcgacttagttaccacaaactatgatcctagcatnaattggggcatctcaacacctcaactccctgtgcaagaacagattttcaatgtctactgatgattttaaatggattanttcctctctttacttcttaagggcatgaagntttatgaaacaaaactatncagttccagacgcttaacccacatagtgttaatagtcaccttcaacacacnactaaacccccaaaaaangntttttacggngtttcgacagttttcttttctttttgacttgnttaacacccnngacaactttgtnctntttccntgaatcacanctttcnaananccaatggtncggttttttctcnttcngggcccttcccttnttnaaaaccanat

SEQ ID NO: 681 - DNA, 494 bp, Homo sapien
  misc_feature (1)...(494): n = A,T,C or G
tcatggtgtccacagtctgatgtgagcgcattaaatttaaggatctccgcccttctccttaaaactcaggacttggcaatgancctaggaagcgcccctcccctccccanccanatccaagccccggaccgctgcgnctccagctgcgcctagtgaaaccgccgaattcgaattcacactcggngggccggcgaaggtgtgcgcgcccgcgggagcgccggggcnagcccgagggactgcaagccaanaanggaggcatgggtggcggggggcgccgtctgatccaggaaggagcggaggcgccgatcacacactcttnagacgccctgcccgcgcctggccagcgcgcagnctgcaggacgcgcggagcaggaactcgctggagtttgccaagccccangnctctggaaagtntgtagctccctttcggancgnctcttctggccctttgggacgggtgtgtcattgggcgggggtctgtataagggggggac

SEQ ID NO: 682 - DNA, 263 bp, Homo sapien
  misc_feature (1)...(263): n = A,T,C or G
tgatcattcaagcgntgngcgnataacgattgctnagcccaacctttcatagggtcgttcctttgggaatnggatgtctattgaatggcagggataggggcactcggcattcgcctctggtacagttttgcatatatatcctcatcgcgagcgagcgtaggggancgttaagtttggggaaatgccnccgcatgnccctnccggagcttaaacccccaacaatncccattttnaaaaaagntttnttanttaaaaaaaaaaac

SEQ ID NO: 683 - DNA, 255 bp, Homo sapien
  misc_feature (1)...(255): n = A,T,C or G
cttgcccggcatgcacagacntntttacggacacnctactccaagngagcctgnanctgtctacggtcaanctctaaggttngncantgccacanatggcatagtcccgagggcggtnantctggantgctctctgcacttgaacntaaagcgcntttcaaganaggnctaatngcctgcctcttgacaacnaacaancccacaccnacctangaccctntangcaaggactggattctgnaaatgcaatacaca

SEQ ID NO: 684 - DNA, 922 bp, Homo sapien
  misc_feature (1)...(922): n = A,T,C or G
acccttcatttcatgtgcttctattttcctacatcttttacatgactaagggattaatgaaatcacctcttcataatcatgaccataatttcatccaacaagtactcaagtttggtgttagcactttattaatgcttacgaattctctctctctccctctttctcttttccttagtccttgcacaataaggatttttgaatgtataatatcatcttaggtaagctttcatatggttttggcatatgaagcttatgactgtcataagccataccaagcctgtggagtatggcatgattttcattacataatccaatgaaaatagacttattttaaatccctaactttgtagttttaatttgtatttcactatcttgaaattaacagctagtacttatccatcacagcagtctcctactgacatgaagcaagttgttgaatgcagtagancatgaatgaaagcatttaatgttanacaaaaatgggtgatacccaagcattctgaattatttgcatcaaggaatgggacatgtacattagtggcatcatttctaccaatatgtgacttgaattgtttttttaaaaaaagganaatgantttctcaatttgctttaaaaaattttnaaaaagttcaatggcatgctgctttgtctggacttaatttattaacaattnttaanccttccttaaggacanaattttggtgttcaggatcnccctgaagggtcttatttttnatannattccaaacccaaaaggtggtttaaaatgggngggttccccccncnaaaatttggaccggcttttttatatttaaaaaanttnccntttgngtttgaaanctnaataccaattaagggggaattttacctnccagtgggaaaaaaaaacnctngccnttnaaaaaattcccnggagncaat

SEQ ID NO: 685 - DNA, 531 bp, Homo sapien
  misc_feature (1)...(531): n = A,T,C or G
tgaggctctgtaaaactgttcctctgctaggcatacttcatattctctatattaaactcatctttaattggcatggaagattcattgttccaaatctcagatgaagatcctatattggatgcaattaagcctggcagcgccctcaaaagacagtcttgtcactgctagccacagccaggacacagtaacagttccttctagtgacccnagaccataanaaatananatctaaagaattctgactccaaaggcattagcccattcctggtattgccaattatgatagaaaaaattgccaagctcctgggacatggaaatacactcagtacatttgagaactggagaactantttccaaaatagtatgaagacatganggtgattgtagatatntgagtttggagaanttgagggaaatcngattacacatgtttactacaagagatgttnataagtaaagaaggcctgatatacaatctaacagacnantgagataaatcttaantcacaactgacntcccttttggggcgg

SEQ ID NO: 686 - DNA, 336 bp, Homo sapien
  misc_feature (1)...(336): n = A,T,C or G
ggngncctnatgagcgcgcgtaatacgatcatatagggcgaattgggtaccgggcccccctcaagaacactacaagctatgtcctcttctcanagagccctgaanttttaacatattgaaagctctnatcttgccaaanaactccacttaacttcaaaacacaccctccacacacatcatgatcaactnagatcttactgaaccagaatcctnaatggcatacttcaggaacaggggtccanagaagcagttctcaaantgcagctnaaaaagaaactgaaaacccaattcatgcaanacctagggcttatttgagagcattttccagtgcagatt

SEQ ID NO: 687 - DNA, 271 bp, Homo sapien
  misc_feature (1)...(271): n = A,T,C or G
aatctgcactggaaaatgctctaaaataagccctaggtcttgcatgaattgggttttcagtttctttttaagctgcactttgagaactgcttctctggacccctgttcctgaagtatgccatttaggattctggttcagtaagatctcagttaatcatgatgtgtgtggagggtgtgttttgaagttnagtggagttctttggcaagatcagagctttcaatatgttnaaacttcagggctctctgagaagaggacatagcttgtagtgtt

SEQ ID NO: 688 - DNA, 740 bp, Homo sapien
  misc_feature (1)...(740): n = A,T,C or G
tgatgaagcgcgcgtnntacnactcactatnggggcgaantatgggtaccgggnccccctcgaagcggccgccctttttttntttttttgtgagagtttaaataaaatatttgagtttaatttaaagtttgagtttaattaaaatatatggcatatcccaagttgggctttgcanaaagaacacttctcaggaactgttagttggtgtaccaggaactcagaagggtcctgttattaaatatatttggaaaatgcatggattctctgaanatcnctctgcatgtgagcaacacttacatcncaaaccaaaattggcattgcatacatnaaccaatatttcccaaacatttctggttatggcccaccccctttgtgtantacttattgctgttttttggaaccctggggaaattacttaaaatattcagctggaaattacaggcgttacttttaagggancaagaattacagtgactcccaaaattgcaagtgttgattactatttaagaacccaagaatttgaaagaaattttgaaaagtgaaaacnggaaatnttaaatgacttctcaaattttgaaaactcnggnaaacatctccactttggtncccttcctttaaaaattggctaaaaattntttnttatncccaccccattggaantnccccccccctggaacaattggattcccctatttcctaaaaaacggccnccccccccggggngaacnccnacnttttgn

SEQ ID NO: 689 - DNA, 635 bp, Homo sapien
  misc_feature (1)...(635): n = A,T,C or G
actagtccagtgtggtggaattccattgtgttgggattacatatacttttagcaatttttaaagaagtgtacaaagttgagatgtttcctgagctctcatatatctganaatgtcattttacatctccgtcttcacctctcaaaacttctttcaattctttggctcttaatagtaatcaacacttgcactctggagtcactgtaattcttgctcctttacagctacncctgttatttccagctgaatatttttagttatttcccagggttccaaaaaacagcaataagtactacacaaagggggtgggccataaccagaaatgtttgggaaatactggctcatgtatgcaatgccaaatctggtttgcnattgtantgttgctcacatgcagagtgaatcttcaaanaatccatgcattttccaaatatatttaataacagggaaccttctganttcctggntacaccaactaacagttcctgaaaaatgttctttctgcaaaacccaacttggggatatgccatatattttaattaaactcaaactttaaattaaactncaattattttattttaaactcctcaaaaaaaaaaaaaaaaagggggggcccttccaanggggggnccggttcccc

SEQ ID NO: 690 - DNA, 3923 bp, Homo sapien
acagaagaaatagcaagtgccgagaagctggcatcagaaaaacagaggggagatttgtgtggctgcagccgagggagaccaggaagatctgcatggtgggaaggacctgatgatacagaggaattacaacacatatacttagtgtttcaatgaacaccaagataaataagtgaagagctagtccgctgtgagtctcctcagtgacacagggctggatcaccatcgacggcactttctgagtactcagtgcagcaaagaaagactacagacatctcaatggcaggggtgagaaataagaaaggctgctgactttaccatctgaggccacacatctgctgaaatggagataattaacatcactagaaacagcaagatgacaatataatgtctaagtagtgacatgtttttgcacatttccagcccctttaaatatccacacacacaggaagcacaaaaggaagcacagagatccctgggagaaatgcccggccgccatcttgggtcatcgatgagcctcgccctgtgcctggtcccgcttgtgagggaaggacattagaaaatgaattgatgtgttccttaaaggatgggcaggaaaacagatcctgttgtggatatttatttgaacgggattacagatttgaaatgaagtcacaaagtgagcattaccaatgagaggaaaacagacgagaaaatcttgatggcttcacaagacatgcaacaaacaaaatggaatactgtgatgacatgaggcagccaagctggggaggagataaccacggggcagagggtcaggattctggccctgctgcctaaactgtgcgttcataaccaaatcatttcatatttctaaccctcaaaacaaagctgttgtaatatctgatctctacggttccttctgggcccaacattctccatatatccagccacactcatttttaatatttagttcccagatctgtactgtgacctttctacactgtagaataacattactcattttgttcaaagacccttcgtgttgctgcctaatatgtagctgactgtttttcctaaggagtgttctggcccaggggatctgtgaacaggctgggaagcatctcaagatctttccagggttatacttactagcacacagcatgatcattacggagtgaattatctaatcaacatcatcctcagtgtctttgcccatactgaaattcatttcccacttttgtgcccattctcaagacctcaaaatgtcattccattaatatcacaggattaacttttttttttaacctggaagaattcaatgttacatgcagctatgggaatttaattacatattttgttttccagtgcaaagatgactaagtcctttatccctcccctttgtttgattttttttccagtataaagttaaaatgcttagccttgtactgaggctgtatacagcacagcctctccccatccctccagccttatctgtcatcaccatcaacccctcccataccacctaaacaaaatctaacttgtaattccttgaacatgtcaggacatacattattccttctgcctgagaagctcttccttgtctcttaaatctagaatgatgtaaagttttgaataagttgactatcttacttcatgcaaagaagggacacatatgagattcatcatcacatgagacagcaaatactaaaagtgtaatttgattataagagtttagataaatatatgaaatgcaagagccacagagggaatgtttatggggcacgtttgtaagcctgggatgtgaagcaaaggcagggaacctcatagtatcttatataatatacttcatttctctatctctatcacaatatccaacaagcttttcacagaattcatgcagtgcaaatccccaaaggtaacctttatccatttcatggtgagtgcgctttagaattttggcaaatcatactggtcacttatctcaactttgagatgtgtttgtccttgtagttaattgaaagaaatagggcactcttgtgagccactttagggttcactcctggcaataaagaatttacaaagagctactcaggaccagttgttaagagctctgtgtgtgtgtgtgtgtgtgtgtgagtgtacatgccaaagtgtgcctctctctcttgacccattatttcagacttaaaacaagcatgttttcaaatggcactatgagctgccaatgatgtatcaccaccatatctcattattctccagtaaatgtgataataatgtcatctgttaacataaaaaaagtttgacttcacaaaagcagctggaaatggacaaccacaatatgcataaatctaactcctaccatcagctacacactgcttgacatatattgttagaagcacctcgcatttgtgggttctcttaagcaaaatacttgcattaggtctcagctggggctgtgcatcaggcggtttgagaaatattcaattctcagcagaagccagaatttgaattccctcatcttttaggaatcatttaccaggtttggagaggattcagacagctcaggtgctttcactaatgtctctgaacttctgtccctctttgtgttcatggatagtccaataaataatgttatctttgaactgatgctcataggagagaatataagaactctgagtgatatcaacattagggattcaaagaaatattagatttaagctcacactggtcaaaaggaaccaagatacaaagaactctgagctgtcatcgtccccatctctgtgagccacaaccaacagcaggacccaacgcatgtctgagatccttaaatcaaggaaaccagtgtcatgagttgaattctcctattatggatgctagcttctggccatctctggctctcctcttgacacatattagcttctagcctttgcttccacgacttttatcttttctccaacacatcgcttaccaatcctctctctgctctgttgctttggacttccccacaagaatttcaacgactctcaagtcttttcttccatccccaccactaacctgaatgcctagacccttatttttattaatttccaatagatgctgcctatgggctatattgctttagatgaacattagatatttaaagctcaagaggttcaaaatccaactcattatcttctctttctttcacctccctgctcctctccctatattactgattgcactgaacagcatggtccccaatgtagccatgcaaatgagaaacccagtggctccttgtggtacatgcatgcaagactgctgaagccagaaggatgactgattacgcctcatgggtggaggggaccactcctgggccttcgtgattgtcaggagcaagacctgagatgctccctgccttcagtgtcctctgcatctcccctttctaatgaagatccatagaatttgctacatttgagaattccaattaggaactcacatgttttatctgccctatcaattttttaaacttgctgaaaattaagttttttcaaaatctgtccttgtaaattactttttcttacagtgtcttggcatactatatcaactttgattctttgttacaacttttcttactcttttatcaccaaagtggcttttattctctttattattattattttcttttactactatattacgttgttattattttgttctctatagtatcaatttatttgatttagtttcaatttatttttattgctgacttttaaaataagtgattcggggggtgggagaacaggggagggagagcattaggacaaatacctaatgcatgtgggacttaaaacctagatgatgggttgataggtgcagcaaaccactatggcacacgtatacctgtgtaacaaacctacacattctgcacatgtatcccagaacgtaaagtaaaatttaaaaaaaagtga

SEQ ID NO: 691 - DNA, 882 bp, Homo sapien
  misc_feature (1)...(882): n = A,T,C or G
ttactcactatagggctcgagcggccgctgaattctgctgcagtgagctgtgattatgtccctgcactccagcctggatgacagaacacgatcatttctctaaagacaaacaaaaaacataaaataaaactagtataaggatagaagcccagggttgatttaagtctgcggaaatcataaaccataggtcagacttctcattgatgaggtacttgtgggttagaatacaattaggtatatttggtctagaaaccaggatggaattagagaataaaagactgagcaatagcatgttatagtattagaaatactatagaaataggaaaagccctgattatgactttggagttctgatccaacatctgggattatttagatattttaaaggaaaacgatgacttttagctctcaggatgttagtttcctcaaccataaaatgaagagcctcgaaaagatttcgtttaccagattatttctgaagtcaattccagttctaaaattccatcactgngcactaaggcaaattgaattgaataaagtattgggnatgcataaaatactctatttttaaaaangaatagtaattatccattggnaacagacgcantcatccagncatctcctaccctgncccatgncntatgtaganatgtanctctaatcccttaacaaaccgattttgcaaaggagcttanccttggggtacttggtcanggcaactggtctactttnaagactcatcttcacttactgggcaccaaatncctaccattgcatcaaactggggttcccatncaaggcaaaccctgngaaatctttaatcccgaaattggcgcccaattttgnggggtttccnaaaagaatcntcccccccgaggggcc

SEQ ID NO: 692 - DNA, 235 bp, Homo sapien
  misc_feature (1)...(235): n = A,T,C or G
ccgcactngtaangnccgccagngngctgnaantccgctnagcncggatccactagtccattgatggtaaaagggtagcttactggnatgtccgnctgctccanganataatacncaggacttctcanagcacttaatatgttaatataaaactncgngaaaaaagatnttcnatgaancnttcctcttaggaggtcaggngagaatagtgttaatgncattaagganagaacga

SEQ ID NO: 693 - DNA, 383 bp, Homo sapien
  misc_feature (1)...(383): n = A,T,C or G
nttatgtaagaaatgtcatatatcttttattttctttaaatcaaaataaatatgactttgagcatcccatcccatgccccatcctatcagaatggtaggaacatcaacacaaataattagtaatgcaccgcatctacattcccatgctctctttacttcttcagcattgcctaaaggcataatacacctttaattaattaattcagcctcctaatgcacattaacaaagcccctgctagactctgtccataatggnaaacctgnatgatccttgatattaacantttaaggaatgctcatggattggttncagacttaaaaaattgagggggctgaanaaaatctaangganaaatcatggaagcatttgcacatattacata

SEQ ID NO: 694 - DNA, 204 bp, Homo sapien
tctcttggctggtcagcctgaagggtggtaatgactcaccaacgctactaatccttcttcactgtcccttatttttttccctcccaggctcataactcgaggttaaactctcttttatacaagaaccctgtctgatgaagcatcatttcagaattttaagtcaacttacaaatgtggtattattcacatctgagtacaaattta

SEQ ID NO: 695 - DNA, 670 bp, Homo sapien
  misc_feature (1)...(670): n = A,T,C or G
gcaccagcccaggtgctgtttcttcacttgagctccatgaccctccctgtgtggtgggttgaacggtgacctccaaaagatatgtccacctggaacctcagaataagatcttatttggaatagtctttgtagatgtcagtaaggtaaagatttggagatgagaccctcctggattagggtaggccctaggtccactggcaggtgtgcttctcagggtctgaaaggggaagacagggccacccagaggaggagacggaggcagagacagggccacccagaggaggagacggaggcagagacagggccacccagaggaggagacggaggcagagacaggggccacccanaggaggagacggaggcagagacagggccacccagaggaggagacggaggcagagacagggccacccaaaggaggagacggaggcagaanacaggcccccccaaagaaganaccggaggcanaaaacagggccacccanaggaggagacggaggcanaaacagggccaccccaaaggaggagacggaggcaaaacagggccacccaaaaggaggaagccggaaggaaaaaacagggcccccccaaaggaggaagncggagggcnaaaaanagggccccccccaaagngagaaaaccnggnaggcnanaaaaccnggggcccnnc

SEQ ID NO: 696 - DNA, 317 bp, Homo sapien
  misc_feature (1)...(317): n = A,T,C or G
tgacccgttntttctgcaaaggagagtggggaaggagggntgggaagacaaaagttacatgttagcagggaagagaacagaattttatccacccttatctctttagtgagtgaacaaacagcccactgtcatcgtggatacatttcacttttttcacatgactaaggagctctccggagtgaagagtgagtaaatatgtttattacgcattcatttgctaagaatcatcaagaacccaaagttagagacgtttcgtggttgaactttctccctactgtctagtagaattatatggggattctggatctgctggtgcc

SEQ ID NO: 697 - DNA, 246 bp, Homo sapien
  misc_feature (1)...(246): n = A,T,C or G
ctncagctctaatcgactnctatnaggnatgatggcncgtgcngcgcgtacgtantgcttggatcctcnnanagcggacgcctactactactaaattcgcggncgcgttgactttttttgtttttttccttnacagagntntttttgtgcccttggttcttatgctcanactcngcaaaaaanatcaaaagntacnnatgaaaaacntatnccatctncanaaaggaggtgnagntattactttct

SEQ ID NO: 698 - DNA, 3674 bp, Homo sapien
agaaagtttccttttttttttttaatggtgaaaagatatacacatatttagaattagccagctgggctcagtttagattattccaattttgttggcaacatccagagcatcgtaatcaggagccagtgaaacatattccttcttctctccatcaggccaaatcacggtgttgaccttggccacatcaatgtcttagaacttcttcacagcctgtttgatctggtgcttgttggctttaacatccacaatgaacacaagtgtgttgttgtcttctatcttcttcgtggtgactcagtggtcagcggaaacttgatgatagcgtagtggtcaagcttgtatctcctgggagcgctcttccaaagatatttgggctgcctcgggagttgcagcgtcttgggccgccggaaggtgggtgacgtacggatcttctttttttgtgtggctgtggacacctttcaacactgtcttcttggcctttaaatccttcgctttggtttcggctataggaggggcaggagcttccttcttcactttcggcgccatcttgtgaaaagggaaagtttcctttctaataccattttcacttctcccgaattttgtggatcgtttcttggtatctaccccagatttcaggagtgttggctggatcttagggattgtgaagtcttcatttccctgtggtgagatctgaggcatgattttaaacagtgtgagggaaggagatctccaggcactttaatagaatggagaagcaggatgggatttgagaggaaatctgattttgaaaaaaggagaactagagttgagttcgtaattaactagcaccttaaaggtcattcagcatgcccatctgcacagtgggtgtaatcaccctacagaacaaaaacaaaaaggcaatggagaggaagctgtaaagcactgtacatgtttaactcattgttatgtaagctagccgaaggcttcacagacttgaattcatctcccaagttctcttcctgtactggaaactctgccttaggttgcttaaaacttgagaaacagaatattgcttcccctgcctgccttcttgagtacacttgcctacacaaagatgcacatccttgtttgtgtgtgtgtgtccatttgctgtgacattcttgtgaaagtcaaagtttcccagctgttgacatacacaagtttgtttggtgcaacctgtcagatgcatcccttagacaggccctttgatactctgggaaagacattggacttacagtcggaacgaaaagaaagaaatgtgatatgtatagcgtgcagtgagttggagttttacctgtattgttttaatttcaacaagcctgaggactagccacaaatgtacccagtttacaaatgaggaaacaggtgcaaaaaggttgttacctgtcaaaggtcgtatgtggcagagccaagatttgagcccagttatgtctgatgaacttagcctatgctctttaaacttctgaatgctgaccattgaggatatctaaacttagatcaattgcattttccctccaagactatttacttatcaatacaataataccacctttaccaatctattgttttgatacgagactcaaatatgccagatatatgtaaaagcaacctacaagctctctaatcatgctcacctaaaagattcccgggatctaataggctcaaagaaacttcttctagaaatataaaagagaaaattggattatgcaaaaattcattattaatttttttcatccatcctttaattcagcaaacatttatctgttgttgactttatgcagtatggccttttaaggattgggggacaggtgaagaacggggtgccagaatgcatcctcctactaatgaggtcagtacacatttgcattttaaaatgccctgtccagctgggcatggtggatcatgcctgtaatctcaacattggaaggccaaggcaggaggattgcttcagcccaggagttcaagaccagcctgggcaacatagaaagaccccatctctcaatcaatcaatcaatgccctgtctttgaaaataaaactctttaagaaaggtttaatgggcagggtgtggtagctcatgcctataatacagcactttgggaggctgaggcaggaggatcactttagcccagaagttcaagaccagcctgggcaacaagtgacacctcatctcaattttttaataaaatgaatacatacataaggaaagataaaaagaaaagtttaatgaaagaatacagtataaaacaaatctcttggacctaaaagtatttttgttcaagccaaatattgtgaatcacctctctgtgttgaggatacagaatatctaagcccaggaaactgagcagaaagttcatgtactaactaatcaacccgaggcaaggcaaaaatgagactaactaatcaatccgaggcaaggggcaaattagacggaacctgactctggtctattaagcgacaactttccctctgttgtatttttcttttattcaatgtaaaaggataaaaactctctaaaactaaaaacaatgtttgtcaggagttacaaaccatgaccaactaattatggggaatcataaaatatgactgtatgagatcttgatggtttacaaagtgtacccactgttaatcactttaaacattaatgaacttaaaaatgaatttacggagattggaatgtttctttcctgttgtattagttggctcaggctgccataacaaaataccacagactgggaggcttaagtaacagaaattcatttctcacagttctgggggctggaagtccacgatcaaggtgcaggaaaggcaggcttcattctgaggcccctctcttggctcacatgtggccaccctcccactgcgtgctcacatgacctctttgtgctcctggaaagagggtgtgggggacagagggaaagagaaggagagggaactctctggtgtctcgtctttcaaggaccctaacctgggccactttggcccaggcactgtggggtggggggttgtggctgctctgctctgagtggccaagataaagcaacagaaaaatgtccaaagctgtgcagcaaagacaagccaccgaacagggatctgctcatcagtgtggggacctccaagtcggccaccctggaggcaagcccccamagagcccatgcaaggtggcagcagcagaagaagggaattgtccctgtccttggcacattcctcaccgacctggtgatgctggacactgcgatgaatggtaatgtggatgagaatatgatggactcccagaaaaggagacccagctgctcaggtggctgcaaatcattacagccttcatcctggggaggaactgggggcctggttctgggtcagagagcagcccagtgagggtgagagctacagcctgtcctgccagctggatccccagtcccggtcaaccagtaatcaaggctgagcagatcaggcttcccggagctggtcttgggaagccagccctggggtgagttggctcctgctgtggtactgagacaatattgtcataaattcaatgcgcccttgtatccctttttcttttttatctgtctacatctataatcactatgcatactagtctttgttagtgtttctattcmacttaatagagatatgttatacttaaaaaaaaaaaaaaaaa

SEQ ID NO: 699 - DNA, 2051 bp, Homo sapien
  misc_feature (1)...(2051): n = A,T,C or G
ggaccaggggctgaagtgaacccccagcacagcacagctgctctataaaaacgtggccagacttttttttttgaagcaagtccctgttcttgttcgtcctgactagtcccatcagggccctggatcccaagactcagcatccaaggtcccctccaggaatcctggcagctcagcatactttatcctgtttcatctgagagcaaaaatgtaaaattggatgcacagaaaagtgactcaaagtgcttaatgactagaagaaatctaggagcagcaagaagagcaggacaaacaggccaggcggtgtcaggagcccaggtctccagctgganggaacgtcaaccctgcagtgggagcaggggccctttgcacatcctaggcacagatggtaatgtagacaccacaggtaagctgggcttggtacctacccctccccggattcagaaagaaaccaaacaaggagctttgtgtggaatgaaacctcctttcctcccagaagcactgctgactgtttggtggttgccatttgtggcagtgagcccttgtttgttctgaggttgggctggtttctcctcttggccctgccctacagatcataaaggagaacagcaagacgtccccagcaaacatccacagatggccttggaaataagtcaccttcctcaccctgcaggaatgccagtgaacatattgctgacatcttggagctcagtacctcatagtgtaacggcgtcagtagatctgcctgtgctgggacttcctgtactacccattcctgaggggcgatgcttctgcagggcctgtgacttggtgcacaacttcagacaccatcatcttgcagcagcaccgcaccctcactagccagggtgttgatgacttcctcaaggccaaggccacattcaaggcttcggacttcattgatgcgcttgtgctgagcaaggtggcttctccgggatcttaattcaggaggtagaatggagcttgagatcaagtgtctgatcaagcctcagtgtatgggcgctgttcatcctctggtgctgaagcagccaagagacccaagtctgcctggctgcctcttaggatatgacagcagagccagtggcctctactagatcctgtacaacctcacaaaacacccagacatcgggagtgctgccagcctgtgatgcaagagtcctaatcctgaagacattgaatgacctgtcgttgtgctgtttttaccaaaaaggatcatgaggatcagagaggaaaagtcacttgcccaaagtcacacagctgaacagtggtggagttcaactttgaccgtgggctgtctggcccccaaggtgtatgcttgcttctctcccaagagactcctttcttatcaggctcaaatgaatgaaaggaggatgttaaagacaacgccattattgacgagatcactcccaagcggattggagattgtcccaatatttagacctatagcaaggccttgggagaaatggtggtgcagcaggagagcaggaacctaaccattgccatcctaaggccctccattgtgtggagcaacgtggcaccagcttttcctgggttgggttgataatctaaatggatgtagccgactcattattgcggtatgtatagggatgaagaagtaactgtaatgtagtggaggaatagtaagaaaattcttagtgctggcttagcttaattgatccaaaaacataaatgctactttactatcaattgaagcatattatttcaattattctggttataatatggaggcaggatgaaattgtttttattcttttagaatttttttttatcaggaaaacagaggtaaagtgctatcaattactatttaagagttctattttgaaaagtgagaattaaggatttttcttttctttttaaaaaaaacttttttaaaaattaaaaataaaagaagcaaaagtcttaggaaaatgaagcaagtagccctgccactctatgtacagtaataacaatatctgtcccagttattatgtacaatattataaaaaatgtcgcagacagtaaaaaaaaaaaaaaaa

SEQ ID NO: 700 - DNA, 2841 bp, Homo sapien
  misc_feature (1)...(2841): n = A,T,C or G
gcagagcacagcatagctgctttaccaaatcatggccagactgcttctgtaagcaggcccctgatcctgttccacctcactggacaggacctcccaactggggcctccagctacccccaccagcatcccttggccaatggaaatttgaaatgttcctgggacagagctcctggagagaggggcaggccaccacctttgctgtttgggtgactagccgttctggcctgcaggctttggagagcccaagctgacaaggggtagaagaggtgcctcagcacagcacagccacgctacgaaaacatggccagactcttgtttaagtcagtccccgaacacatttctagtcagtgggtgaagtctttcaaccagggtctctggctaccttgactgctgttctctggccgacagaggtctcaggcctccctgagtcagagctcccggggggaggaccagattgtcatctttgctgtttgggtgacccagccatttcagccttagggcttcagagtgtctgaggtagccaggggctgaagtgaacccccagcacagcacagctgctgtataaaaacgtggccagactttttctttaagcaagtccctgttcttattcctcctgactaggtaagacttctcaacttgcctccagccacatcttattggtgtgttcagattggcaacaggtttgtacctcagtggtacagagctcccagaggaaggggtaggctatcatcttccctggaaaatacgagtcaattagggacttgaggggacccccagcattccacagcagcccttcagaaaagtggccagactctgtacttgatgggcagatcctcctggcctgtgtctctagccagcccaccactggagctatcaagccagtagcaactcagcagttccttggacagagcttccaggagcaaatgaaatcctttctgccactgcctttgcagtgaactgcccttgctatcctcagaagatatatcacgggagcaaagaccctaagtgccatatcaacacctccaataagctgcagttgacccaaagaacaagccaatccatctcccacaggttccacacacactccactactcatcaccagacagggaaccctggcttgggcccacagcacagaccctccatcctgggccgattacactgagtgattgctaactcacatgtctctgggatggagcacccaggagacaagcaaagtggtggagcagcaagtcaggtgatgtggagcccagagggcagggagagctatctctctgggctccacttgcccttgtgagacactttgtcccagcactccttagtctgcttgcctctcccagggccccagcctggccacacctgcttacagggcactctcagatgcccataccatagtttctgtgctagtggaccgtaccatatcagtggagagctgcagcaaggtggcccntacggccacgcaccagcctgcacattacctctccatactgcagccctttatatggaaacttcctacatcactttgctgtgtgtgtttacacaggtggattttgctttacttgcactgacagcacacaggagggcagcacacaccccaacccacatcaactgccattaaagaaaagaaatttcagcccataatttcatgtccagcaaaattaggcatcataagtgaaggagaaataagatccttttcagacaagcaaatgctgagggaattcaatatcaccagatctaccttacaagagctcctgaaggaagcactaaatatggaaagaaaaaaccatcaccagccactacaaaaatgcagtgaagaacgcagtgaattacgcagtccagtgatgctaaaaaccaaccacatacgttaagtctgcaaaataaccagctgacagcatgacgacaggataaatccacacataccattactaaccttaaatgaaaatgggctaaatgctcccattgaaagacatggggcaagctggataaagaaccaagacccactggagtatgctgtcttcaagaaacccatctcacatgcggtggcatacataggctcaaaataaaggaatggagaaaaatatttcaagcaaatggaaaacagaaaaaagcaggtgttgcactcctactttctgacaaaacagactatgcgaataaagataaaaaagagaaggacattacaaaggtggtcctgacctttgatatatctcattgcttgataccaacctgggctgttttaattgcccaaanccaataggataatttgctgaggttgtggagcttctcccctgcagagagtccctgatctcccaaaatttggttgagatgtaaggttgattttgctgtacaactccttttctgaagttttactcatttccaaaaaggaaggcaagttttcctgcttccatgacgatggagagcaggcatctcctttcctgagtttcagcttgcttctgacagggaaggtgagtgtaagttttttccagcttctaagatggcagagaacgatcaccagcctgagccttatttccaggtaagtagctgaattagagttttgtcttaaaatttttccttaatgattaaaatgtaagattacccaccagctgcttttaatttctcccttagcattagaacactcagtaatcatatgaattgtgcatttgtttgttttgcttaactctttctgtttgtttatgtttggggttttattgttgttgtttcacttttctcccatctcttcctgacttggtcaaatccaaaggaatgttcgaaattgtggggagcaaggcatctgaaatggctaaaactcctgtggctgcaaaaaatagaaataaaaaaaaaaaaaaa

SEQ ID NO: 701 - DNA, 3228 bp, Homo sapien
  misc_feature (1)...(3228): n = A,T,C or G
tccgccccattgacgcaaatggcggtaggcgtgtacggtgggaggtctatataagcagagctctcnggctaactagagaacccactgcttactggcttatcgaaattaatacgactcactatagggagacccaagctggctagcgtttaaacttaagcttggtaccgagctcggatccactagtccagtgtggtggaattccattgtgttgggcaggaaacaagcaaagtggtggagcagcaagtcaggtgatgtggagcccagaggtcagggatggctgtctctctagggtccacttgcccttgtgagacactttatcccagcactttaggaatactgaggtcataccagccacatcttatatgcaagattgcccagcagagatcaggtccgagagttccctttttaaaaaaaggagacttgcttaataaaagaagtctagccacgtttgtgtagagcggctgtgctgtgctgggggttcacttttgagagagttctcctctgagacctgatctctggaggctgggcaatcttgcacttgagatggggctggtctgatctcagcactccttagtctgctcgcctctcccatggccccagcctggccacacctgcttacggggcactcttagatgcccacaccataacttccatgctagtggactgtaccatatcagtggagagctgcagcaaggtggcccctagagccacgcaccagcctgcacattgcctctccatacggcagccctttatttggaaacttcctaaatcactttgctgtgtgtgtttacacgggtgtgttttgctttacttgccctgagagcacacgggagtgcagcacacaccccaacccacatcaactgccattaaagaaaagaaatttcagcccagaatttcatgtccagcaaaattaagcatcataagtgaaggagaaataagatccttttcagacaagcaagtgctgagggaatttggtatcaccagatctaccttacgagagctcctgaaggaagcactaaatatggaaagaaaagatcatcacctgctactacaaaaacacactgaagtacacagtccaatgatgctaaaaagcaagcacatatgtaagtctgcaaaataaccagctgacagcatgacgacaggataaaatccacacataccattactaaccttaaatgtaaatgggctaaatgctcccattgaaagacacggggcaagctgggtaaagaaccaagacccactggagtatgccgtcttcaagcaacccatctcacgtgcagtgccatacataggctcaaaataaaggaatggagaaaaatatttcaagcaaatggaaaacagaaaaaaggtgttgcactcccagtttctgacaaaacagactctaccaataaagataaaaaaagagaaggacattacaaaggtggtcctgacctttgataaatctcattattgcttgataccaacctgggctatttgtattgcccaaacgaataggataatttgctgaggttgtggagcttctccccttcacagagtccctgatctccgaaaatttggttgagatgtaaggttgattttgctgtacaactccttttttgaagttttactcatttccaacaaggaaggcaagttttcctgcttccattgacaaaggagagcaggcacctcctttcctgagtttcagcttgcttctgacagggaaggagctttgagatttgaatactggcctgctgggttttggacgtgcattgggcctgtggtcccatttgtgttatttttctgggaaatttcttccctttggagtgagaaagcttacccaatgcctgtaccatcatcgtaccttaaaagaactccattttaagttcagggactccttggcagaagagaccgtagccttgtatcagatcataaaggagaagagcaagaggtccccggcaaacatccacagatggccttggaaataagtcaccttgctcaccctgcaggaatgccagtgaacttattgctgacatcttggagctcagtaccctcatagtgtaacggcgtcagcagatctgcctgtgctgggacttcctgtactacccattcctgaggggcgatgcttctgcagggcctgtgacttggtgcacaacttcagacaccatcatcttgcagcagcaccgcaccctcactagccagggtgttgatgacttcctcaaggccaaggccacattcaaggcttcggacttcattgatgcgcttgtgctgagcaaggtggcttctccgggatcttaattcaggaggtagaatggagcttgagatcaagtgtctgatcaagcctcagtgtatgggcgctgttcatcntctggtgctgaagcagccaagagacccaagtctgcctggctgcntcttaggatatgacagcagagccagtggcctctactagatcctgtacaacctcacaaaacacccagacatcgggagtgctgccagcctgtgatgcaagagtcctaatcctgaagacattgaatgacctgtcattctgctgtttttaccaaaaaggatcatgaggatcagagaggaaaagtcacttgcccaaagtcacacagctgaacagtggtggagttcaactttgaccgtgggctgtctgaccccaaggtgtatgcttgcttctctcccaagagacaactttcttatcaggctcaaatgaatgaaaggaggatgttaaaggtaggatctctgaagcctgtgccagtggaaccgcagctcatggctggcacctgtgttctcattcttacctcattaagagtaaagtttattgagtttattgaatttaagtatctttagtgagatcatatattattagtaagaactgggaccaaacagattttctgactctaaaagagagattttcacagaaacagatatatacctgtaagtatacagacacgcatacacacatttctttactgctcataaaaattagtccttattagaatgtgggatgtataaatgtaagagaattttcatgttaaaattgacagatacatttttaaattgtcctaaaataaatttaattatttttnttttagaattttccattattaatgttatttttatgagaaactatataactttattgataatacatacaataaccctttgtttttcaaattgaaaatacagtgtattttgcaaataactaagtcctaattttgtattaaaattttaaattttcaaaaaaaaaaa

SEQ ID NO: 702 - DNA, 4894 bp, Homo sapiens
ctgcacgcgctggctccgggtgacagccgcgcgcctcggccaggatctgagtgatgagacgtgtccccactgaggtgccccacagcagcaggtgttgagcatgggctgagaagctggaccggcaccaaagggctggcagaaatgggcgcctggctgattcctaggcagttggcggcagcaaggaggagaggccgcagcttctggagcagagccgagacgaagcagttctggagtgcctgaacggccccctgagccctacccgcctggcccactatggtccagaggctgtgggtgagccgcctgctgcggcaccggaaagcccagctcttgctggtcaacctgctaacctttggcctggaggtgtgtttggccgcaggcatcacctatgtgccgcctctgctgctggaagtgggggtagaggagaagttcatgaccatggtgctgggtgagtcactacatcctccttccttcctgttccagatacatgccacctggcatgtgggacaggagtacctctgccctgggagctgcttggagggagaggtggtctgctgggaaggcattgctgggcaggagggtgaccctgggctgagggggcacaccaagagaaagaagagaataccaaggacataccccagtcacctctggatccctggtcctgcacagagcctggctcataggagacactggagaaatgctcctaacctttggctagcccttttataatttatagcgattatctcatttaatgcttacaaccaccatttgaggtgatccattttacagagaaggaagcagaggcttttaagaggttaggtaagtcttagccaaagccaaatagcagctgaacagtagagctgggactccatcaaggtctcccagccggagcttgctcctacccctaggacaaggggtggactcctgactctgcagataaattctacaaaagccacagaaggcaagtagtaaccattgtgtgacaacccctcacccccaggaagaggggcccctgtgaggattgcaggctctggagtcacactgcttgttgaaacgctgcctcttaccctccctaggtctgcgcctttgaataagtatcacttcttagttgctccatgcctcagtttgtccatctgaaaatgggggcatctgtaatgcctgtgttatgaggagtaaattacagcatccctgtgaagacgtagcacagtgtcgagtacggaatgttatttccatccttctcacggagcttggttccccttccccttgccctttacttgtcccagccattgactcatactacttcccttcttgcaggcattggtccagtgctgggcctggtctgtgtcccgctcctaggctcagccagtgaccactggcgtggacgctatggccgccgccggcccttcatctgggcactgtccttgggcatcctgctgagcctctttctcatcccaagggccggctggctagcagggctgctgtgcccggatcccaggcccctggagctggcactgctcatcctgggcgtggggctgctggacttctgtggccaggtgtgcttcactccactggaggccctgctctctgacctcttccgggacccggaccactgtcgccaggcctactctgtctatgccttcatgatcagtcttgggggctgcctgggctacctcctgcctgccattgactgggacaccagtgccctggccccctacctgggcacccaggaggagtgcctctttggcctgctcaccctcatcttcctcacctgcgtagcagccacactgctggtggctgaggaggcagcgctgggccccaccgagccagcagaagggctgtcggccccctccttgtcgccccactgctgtccatgccgggcccgcttggctttccggaacctgggcgccctgcttccccggctgcaccagctgtgctgccgcatgccccgcaccctgcgccggctcttcgtggctgagctgtgcagctggatggcactcatgaccttcacgctgttttacacggatttcgtgggcgaggggctgtaccagggcgtgcccagagctgagccgggcaccgaggcccggagacactatgatgaaggtaaggccttggcagccagcagaggctggtgtgggagccgcccaccagagacgacactcggggctgtgtctgggctggtgcctctccatcctggccccgacttctctgtcaggaaagtggggatggaccccatctgcatacacggcttctcatgggtgtggaacatctctgcttgcggtttcaggaaggcctctggctgctctaggagtctgatcagagtcgttgccccagtttgacagaaggaaaggcggagcttattcaaagtctagagggagtggaggagttaaggctggatttcagatctgcctggttccagccgcagtgtgccctctgctcccccaacgactttccaaataatctcaccagcgccttccagctcaggcgtcctagaagcgtcttgaagcctatggccagctgtctttgtgttccctctcacccgcctgtcctcacagctgagactcccaggaaaccttcagactaccttcctctgccttcagcaaggggcgttgcccacattctctgagggtcagtggaagaacctagactcccattgctagaggtagaaaggggaagggtgctggggagcagggctggtccacagcaggtctcgtgcagcaggtacctgtggttccgccttctcatctccctgagactgctccgacccttccctcccaggctctgtctgatggcccctctccctctgcaggcgttcggatgggcagcctggggctgttcctgcagtgcgccatctccctggtcttctctctggtcatggaccggctggtgcagcgattcggcactcgagcagtctatttggccagtgtggcagctttccctgtggctgccggtgccacatgcctgtcccacagtgtggccgtggtgacagcttcagccgccctcaccgggttcaccttctcagccctgcagatcctgccctacacactggcctccctctaccaccgggagaagcaggtgttcctgcccaaataccgaggggacactggaggtgctagcagtgaggacagcctgatgaccagcttcctgccaggccctaagcctggagctcccttccctaatggacacgtgggtgytggaggcagtggcctgctcccacctccacccgcgctctgcggggcctctgcctgtgatgtctccgtacgtgtggtggtgggtgagcccaccgaggccagggtggttccgggccggggcatctgcctggacctcgccatcctggatagtgccttcctgctgtcccaggtggccccatccctgtttatgggctccattgtccagctcagccagtctgtcactgcctatatggtgtctgccgcaggcctgggtctggtcgccatttactttgctacacaggtagtatttgacaagagcgacttggccaaatactcagcgtagaaaacttccagcacattggggtggagggcctgcctcactgggtcccagctccctgctcctgttagccccatggggctgccgggctggccgccagtttctgttgctgccaaagtaatgtggctctctgctgccaccctgtgctgctgaggtgcgtagctgcacagctgggggctggggcgtccctctcctctctccccagtctctagggctgcctgactggaggccttccaagggggtttcagtctggacttatacagggaggccagaagggctccatgcactggaatgcggggactctgcaggtggattacccaggctcagggttaacagctagcctcctagttgagacacacctagagaagggtttttgggagctgaataaactcagtcacctggtttcccatctctaagccccttaacctgcagcttcgtttaatgtagctcttgcatgggagtttctaggatgaaacactccaccatgggatttgaacatatgaaagttatttgtaggggaagagtcctgaggggcaacacacaagaaccaggtcccctcagcccacagcactgtctttttgctgatccacccccctcttaccttttatcaggatgtggcctgttggtccttctgttgccatcacagagacacaggcatttaaatatttaacttatttatttaacaaagtagaagggaatccattgctagcttttctgtgttggtgtctaatatttgggtagggtgggggatccccaacaatcaggtcccctgagatagctggtcattgggctgatcattgccagaatcttcttctcctggggtctggccccccaaaatgcctaacccaggaccttggaaattctactcatcccaaatgataattccaaatgctgttacccaaggttagggtgttgaaggaaggtagagggtggggcttcaggtctcaacggcttccctaaccacccctcttctcttggcccagcctggttccccccacttccactcccctctactctctctaggactgggctgatgaaggcactgcccaaaatttcccctacccccaactttcccctacccccaactttccccaccagctccacaaccctgtttggagctactgcaggaccagaagcacaaagtgcggtttcccaagcctttgtccatctcagcccccagagtatatctgtgcttggggaatctcacacagaaactcaggagcaccccctgcctgagctaagggaggtcttatctctcagggggggtttaagtgccgtttgcaataatgtcgtcttatttatttagcggggtgaatattttatactgtaagtgagcaatcagagtataatgtttatggtgacaaaattaaaggctttcttatatgtttaaaaa

SEQ ID NO: 703 - DNA, 2904 bp, Homo sapiens
gtctatgccttcatgatcagtcttgggggctgcctgggctacctcctgcctgccattgactgggacaccagtgccctggccccctacctgggcacccaggaggagtgcctctttggcctgctcaccctcatcttcctcacctgcgtagcagccacactgctggtggctgaggaggcagcgctgggccccaccgagccagcagaagggctgtcggccccctccttgtcgccccactgctgtccatgccgggcccgcttggctttccggaacctgggcgccctgcttccccggctgcaccagctgtgctgccgcatgccccgcaccctgcgccggctcttcgtggctgagctgtgcagctggatggcactcatgaccttcacgctgttttacacggatttcgtgggcgaggggctgtaccagggcgtgcccagagctgagccgggcaccgaggcccggagacactatgatgaaggaaggcctctggctgctctaggagtctgatcagagtcgttgccccagtttgacagaaggaaaggcggagcttattcaaagtctagagggagtggaggagttaaggctggatttcagatctgcctggttccagccgcagtgtgccctctgctcccccaacgactttccaaataatctcaccagcgccttccagctcaggcgtcctagaagcgtcttgaagcctatggccagctgtctttgtgttccctctcacccgcctgtcctcacagctgagactcccaggaaaccttcagactaccttcctctgccttcagcaaggggcgttgcccacattctctgagggcgttcggatgggcagcctggggctgttcctgcagtgcgccatctccctggtcttctctctggtcatggaccggctggtgcagcgattcggcactcgagcagtctatttggccagtgtggcagctttccctgtggctgccggtgccacatgcctgtcccacagtgtggccgtggtgacagcttcagccgccctcaccgggttcaccttctcagccctgcagatcctgccctacacactggcctccctctaccaccgggagaagcaggtgttcctgcccaaataccgaggggacactggaggtgctagcagtgaggacagcctgatgaccagcttcctgccaggccctaagcctggagctcccttccctaatggacacgtgggtgctggaggcagtggcctgctcccacctccacccgcgctctgcggggcctctgcctgtgatgtctccgtacgtgtggtggtgggtgagcccaccgaggccagggtggttccgggccggggcatctgcctggacctcgccatcctggatagtgccttcctgctgtcccaggtggccccatccctgtttatgggctccattgtccagctcagccagtctgtcactgcctatatggtgtctgccgcaggcctgggtctggtcgccatttactttgctacacaggtagtatttgacaagagcgacttggccaaatactcagcgtagaaaacttccagcacattggggtggagggcctgcctcactgggtcccagctccccgctcctgttagccccatggggctgccgggctggccgccagtttctgttgctgccaaagtaatgtggctctctgctgccaccctgtgctgctgaggtgcgtagctgcacagctgggggctggggcgtccctctcctctctccccagtctctagggctgcctgactggaggccttccaagggggtttcagtctggacttatacagggaggccagaagggctccatgcactggaatgcggggactctgcaggtggattacccaggctcagggttaacagctagcctcctagttgagacacacctagagaagggtttttgggagctgaataaactcagtcacctggtttcccatctctaagccccttaacctgcagcttcgtttaatgtagctcttgcatgggagtttctaggatgaaacactcctccatgggatttgaacatatgaaagttatttgtaggggaagagtcctgaggggcaacacacaagaaccaggtcccctcagcccacagcactgtctttttgctgatccacccccctcttaccttttatcaggatgtggcctgttggtccttctgttgccatcacagagacacaggcatttaaatatttaacttatttatttaacaaagtagaagggaatccattgctagcttttctgtgttggtgtctaatatttgggtagggtgggggatccccaacaatcaggtcccctgagatagctggtcattgggctgatcattgccagaatcttcttctcctggggtctggccccccaaaatgcctaacccaggaccttggaaattctactcatcccaaatgataattccaaatgctgttacccaaggttagggtgttgaaggaaggtagagggtggggcttcaggtctcaacggcttccctaaccacccctcttctcttggcccagcctggttccccccacttccactcccctctactctctctaggactgggctgatgaaggcactgcccaaaatttcccctacccccaactttcccctacccccaactttccccaccagctccacaaccctgtttggagctactgcaggaccagaagcacaaagtgcggtttcccaagcctttgtccatctcagcccccagagtatatctgtgcttggggaatctcacacagaaactcaggagcaccccctgcctgagctaagggaggtcttatctctcagggggggtttaagtgccgtttgcaataatgtcgtcttatttatttagcggggtgaatattttatactgtaagtgagcaatcagagtataatgtttatggtgacaaaattaaaggctttcttatatgtttaaaaa

SEQ ID NO: 704 - DNA, 4034 bp, Homo sapiens
aaccagcctgcacgcgctggctccgggtgacagccgcgcgcctcggccaggatctgagtgatgagacgtgtccccactgaggtgccccacagcagcaggtgttgagcatgggctgagaagctggaccggcaccaaagggctggcagaaatgggcgcctggctgattcctaggcagttggcggcagcaaggaggagaggccgcagcttctggagcagagccgagacgaagcagttctggagtgcctgaacggccccctgagccctacccgcctggcccactatggtccagaggctgtgggtgagccgcctgctgcggcaccggaaagcccagctcttgctggtcaacctgctaacctttggcctggaggtgtgtttggccgcaggcatcacctatgtgccgcctctgctgctggaagtgggggtagaggagaagttcatgaccatggtgctgggcattggtccagtgctgggcctggtctgtgtcccgctcctaggctcagccagtgaccactggcgtggacgctatggccgccgccggcccttcatctgggcactgtccttgggcatcctgctgagcctctttctcatcccaagggccggctggctagcagggctgctgtgcccggatcccaggcccctggagctggcactgctcatcctgggcgtggggctgctggacttctgtggccaggtgtgcttcactccactggaggccctgctctctgacctcttccgggacccggaccactgtcgccaggcctactctgtctatgccttcatgatcagtcttgggggctgcctgggctacctcctgcctgccattgactgggacaccagtgccctggccccctacctgggcacccaggaggagtgcctctttggcctgctcaccctcatcttcctcacctgcgtagcagccacactgctggtggctgaggaggcagcgctgggccccaccgagccagcagaagggctgtcggccccctccttgtcgccccactgctgtccatgccgggcccgcttggctttccggaacctgggcgccctgcttccccggctgcaccagctgtgctgccgcatgccccgcaccctgcgccggctcttcgtggctgagctgtgcagctggatggcactcatgaccttcacgctgttttacacggatttcgtgggcgaggggctgtaccagggcgtgcccagagctgagccgggcaccgaggcccggagacactatgatgaaggtaaggccttggcagccagcagaggctggtgtgggagccgcccaccagagacgacactcggggctgtgtctgggctggtgcctctccatcctggccccgacttctctgtcaggaaagtggggatggaccccatctgcatacacggcttctcatgggtgtggaacatctctgcttgcggtttcaggaaggcctctggctgctctaggagtctgatcagagtcgttgccccagtttgacagaaggaaaggcggagcttattcaaagtctagagggagtggaggagttaaggctggatttcagatctgcctggttccagccgcagtgtgccctctgctcccccaacgactttccaaataatctcaccagcgccttccagctcaggcgtcctagaagcgtcttgaagcctatggccagctgtctttgtgttccctctcacccgcctgtcctcacagctgagactcccaggaaaccttcagactaccttcctctgccttcagcaaggggcgttgcccacattctctgagggtcagtggaagaacctagactcccattgctagaggtagaaaggggaagggtgctggggagcagggctggtccacagcaggtctcgtgcagcaggtacctgtggttccgccttctcatctccctgagactgctccgacccttccctcccaggctctgtctgatggcccctctccctctgcaggcgttcggatgggcagcctggggctgttcctgcagtgcgccatctccctggtcttctctctggtcatggaccggctggtgcagcgattcggcactcgagcagtctatttggccagtgtggcagctttccctgtggctgccggtgccacatgcctgtcccacagtgtggccgtggtgacagcttcagccgccctcaccgggttcaccttctcagccctgcagatcctgccctacacactggcctccctctaccaccgggagaagcaggtgttcctgcccaaataccgaggggacactggaggtgctagcagtgaggacagcctgatgaccagcttcctgccaggccctaagcctggagctcccttccctaatggacacgtgggtgctggaggcagtggcctgctcccacctccacccgcgctctgcggggcctctgcctgtgatgtctccgtacgtgtggtggtgggtgagcccaccgaggccagggtggttccgggccggggcatctgcctggacctcgccatcctggatagtgccttcctgctgtcccaggtggccccatccctgtttatgggctccattgtccagctcagccagtctgtcactgcctatatggtgtctgccgcaggcctgggtctggtcgccatttactttgctacacaggtagtatttgacaagagcgacttggccaaatactcagcgtagaaaacttccagcacattggggtggagggcctgcctcactgggtcccagctccccgctcctgttagccccatggggctgccgggctggccgccagtttctgttgctgccaaagtaatgtggctctctgctgccaccctgtgctgctgaggtgcgtagctgcacagctgggggctggggcgtccctctcctctctccccagtctctagggctgcctgactggaggccttccaagggggtttcagtctggacttatacagggaggccagaagggctccatgcactggaatgcggggactctgcaggtggattacccaggctcagggttaacagctagcctcctagttgagacacacctagagaagggtttttgggagctgaataaactcagtcacctggtttcccatctctaagccccttaacctgcagcttcgtttaatgtagctcttgcatgggagtttctaggatgaaacactcctccatgggatttgaacatatgaaagttatttgtaggggaagagtcctgaggggcaacacacaagaaccaggtcccctcagcccacagcactgtctttttgctgatccacccccctcttaccttttatcaggatgtgcctgttggtccttctgttgccatcacagagacacaggcatttaaatatttaacttatttatttaacaaagtagaagggaatccattgctagcttttctgtgttggtgtctaatatttgggtagggtgggggatccccaacaatcaggtcccctgagatagctggtcattgggctgatcattgccagaatcttcttctcctggggtctggccccccaaaatgcctaacccaggaccttggaaattctactcatcccaaatgataattccaaatgctgttacccaaggttagggtgttgaaggaaggtagagggtggggcttcaggtctcaacggcttccctaaccacccctcttctcttggcccagcctggttccccccacttccactcccctctactctctctaggactgggctgatgaaggcactgcccaaaatttcccctacccccaactttcccctacccccaactttccccaccagctccacaaccctgtttggagctactgcaggaccagaagcacaaagtgcggtttcccaagcctttgtccatctcagcccccagagtatatctgtgcttggggaatctcacacagaaactcaggagcaccccctgcctgagctaagggaggtcttatctctcagggggggtttaagtgccgtttgcaataatgtcgtcttatttatttagcggggtgaatattttatactgtaagtgagcaatcagagtataatgtttatggtgacaaaattaaaggctttcttatatgtttaaaaa

SEQ ID NO: 705 - DNA, 6976 bp, Homo sapiens
gaagctggaccggcaccaaagggctggcagaaatgggcgcctggctgattcctaggcagttggcggcagcaaggaggagaggccgcagcttctggagcagagccgagacgaagcagttctggagtgcctgaacggccccctgagccctacccgcctggcccactatggtccagaggctgtgggtgagccgcctgctgcggcaccggaaagcccagctcttgctggtcaacctgctaacctttggcctggaggtgtgtttggccgcaggcatcacctatgtgccgcctctgctgctggaagtgggggtagaggagaagttcatgaccatggtgctgggtgagtcactacatcctccttccttcctgttccagatacatgccacctggcatgtgggacaggagtacctctgccctgggagctgcttggagggagaggtggtctgctgggaaggcattgctgggcaggagggtgaccctgggctgagggggcacaccaagagaaagaagagaataccaaggacataccccagtcacctctggatccctggtcctgcacagagcctggctcataggagacactggagaaatgctcctaacctttggctagcccttttataatttatagcgattatctcatttaatgcttacaaccaccatttgaggtgatccattttacagagaaggaagcagaggcttttaagaggttaggtaagtcttagccaaagccaaatagcagctgaacagtagagctgggactccatcaaggtctcccagccggagcttgctcctacccctaggacaaggggtggactcctgactctgcagataaattctacaaaagccacagaaggcaagtagtaaccattgtgtgacaacccctcacccccaggaagaggggcccctgtgaggattgcaggctctggagtcacactgcttgttgaaacgctgcctcttaccctccctaggtctgcgcctttgaataagtatcacttmttagttgctccatgcctcagtttgtccatctgaaaatgggggcatctgtaatgcctgtgttatgaggagtaaattacagcatccctgtgaagacgtagcacagtgtcgagtacggaatgttatttccatccttctcacggagcttggttccccttccccttgccctttacttgtcccagccattgactcatactacttcccttcttgcaggcattggtccagtgctgggcctggtctgtgtcccgctcctaggctcagccagtgaccactggcgtggacgctatggccgccgccggcccttcatctgggcactgtccttgggcatcctgctgagcctctttctcatcccaagggccggctggctagcagggctgctgtgcccggatcccaggcccctggagctggcactgctcatcctgggcgtggggctgctggacttctgtggccaggtgtgcttcactccactggaggccctgctctctgacctcttccgggacccggaccactgtcgccaggcctactctgtctatgccttcatgatcagtcttgggggctgcctgggctacctcctgcctgccattgactgggacaccagtgccctggccccctacctgggcacccaggaggagtgcctctttggcctgctcaccctcatcttcctcacctgcgtagcagccacactgctggtggctgaggaggcagcgctgggccccaccgagccagcagaagggctgtcggccccctccttgtcgccccactgctgtccatgccgggcccgcttggctttccggaacctgggcgccctgcttccccggctgcaccagctgtgctgccgcatgccccgcaccctgcgccggctcttcgtggctgagctgtgcagctggatggcactcatgaccttcacgctgttttacacggatttcgtgggcgaggggctgtaccagggcgtgcccagagctgagccgggcaccgaggcccggagacactatgatgaaggtaaggccttggcagccagcagaggctggtgtgggagccgcccaccagagacgacactcggggctgtgtctgggctggtgcctctccatcctggccccgacttctctgtcaggaaagtggggatggaccccatctgcatacacggcttctcatgggtgtggaacatctctgcttgcggtttcaggaaggcctctggctgctctaggagtctgatcagagtcgttgccccagtttgacagaaggaaaggcggagcttattcaaagtctagagggagtggaggagttaaggctggatttcagatctgcctggttccagccgcagtgtgccctctgctcccccaacgactttccaaataatctcaccagcgccttccagctcaggcgtcctagaagcgtcttgaagcctatggccagctgtctttgtgttccctctcacccgcctgtcctcacagctgagactcccaggaaaccttcagactaccttcctctgccttcagcaaggggcgttgcccacattctctgagggtcagtggaagaacctagactcccattgctagaggtagaaaggggaagggtgctggggagcagggctggtccacagcaggtctcgtgcagcaggtacctgtggttccgccttctcatctccctgagactgctccgacccttccctcccaggctctgtctgatggcccctctccctctgcaggcgttcggatgggcagcctggggctgttcctgcagtgcgccatctccctggtcttctctctggtcatggaccggctggtgcagcgattcggcactcgagcagtctatttggccagtgtggcagctttccctgtggctgccggtgccacatgcctgtcccacagtgtggccgtggtgacagcttcagccgccctcaccgggttcaccttctcagccctgcagatcctgccctacacactggcctccctctaccaccgggagaagcaggtactcattggccagtgggtggagtcagggtgggaggggtggtctgggtttttgggaggccaactagctcagaacctggtatctggcaagcaactttggagaatgcttctttgaatcagagaagaagcttatcctagccccagggccagaggcttgggctgcagaacagtgtagattagattctgggaatgacttcctggggtcaggactgtgtagcacttgaatggatgattgcaggaaatgcaaaatacgatagtgggaatcccgaagggtcaggccagcaggagccctaggcttctaggctggttgttctatggagaggcagggcgctgaatcagatgacccctgggccattcagcctcagcagacgggagtgggaatggtccagccttagcaacacctttcttcagggagcagcaacctgacttagcctgtatcctactctggtctctgagatggggcaggctccttcctaccccctttctttctggcttatttttcttttctgtctaattcccttttcttttcctgcatccctcctttgcctccttccctttctccttccccttccccttcccctgtggcagatatctgagcttgacacctgacccactcacttgggcactgtgtaagttgtggggacctccttcttggttggccctacactaaccagcccctccaggggcccctttccttgggaagccacctaacccaggtagtgtggtcatccttgtcccctccactgacctcactgagctacaaacctgggtgctggactctgccttgaggggcatgaagttggggtgtcccaagggaggaggagatgcaggactgctctcatagagctctcagactgtagggaagacctgcccctgcgtctcgtagcacttgaggagaggagtaggtaagttcgtagctgagaggctggttaactgagtaggtagctgcaggggtgagaggtatggaggggaggggctaaggttttggttgggggagcctggtccctgagacccctgttagcccactgataaccttcttcagccttcactcttctgcttgcctgggctgggggcagggggctggcatcagcggccaggcctgagtatgtgctgtcgtgccagggaacgttctggggctagccatcttctccagatggaggagcatgtctgtcctcggaccactccagactccaacctcagcggacattcctggggtggcaggcagggaggagaagtcctgggaggccccttcctaacagcagctgatggcagacttggcactgcacgctgtctgcctgttcctttgcccacttgttgagctgcatggtgagccgtgggcttccctggtgtcaggtttgagctctgccatggctcccacctcgcaaatgcagccaactcaactcttctggcatggggacaatgttggataagacctggccttgtccttaaataggaggctctgggccatcaagggcaggggttggggggatggtggtcgaccagtcactctgatctaagtcagacagcaggaaggaagtgagaagccttcaacattagcacagctggggctgggggaggtgggaagagggacattcctcctgcttggggtctactggattctccctgccccaaggctggggacaagggagctcatggcagggcagctaccctagtggcatctgggaccccagagaggcagagcttctctgcaccgggcaatgaggatttccagatgtcggagtggagggcaggcaggaaggaaggttaggagagcctgcgtggggtttgggccatcaggggccctgccttggcttttgttcctctgttctgtgcatctcttaccaccgtcttcattccccctgtgtcttttccttaccttggagctctgttctctctgatctgtgatattgagtttgtctgcctcttacctgttctaagaggctagaggagacctagacttctgggttcacatttgtccccgccctaccccgttacccttctcccactcctgaggaagggtcctggttagacttggaccaagtagggtctccatcttctctcctgctcctgattctcatgaagtcccattgcccctgggatggaggcaagggtctgttctcacagctggggtggtgccagtgctgggtacacacctgtcctcttccccttttcttcacccctctgccttaggtgttcctgcccaaataccgaggggacactggaggtgctagcagtgaggacagcctgatgaccagcttcctgccaggccctaagcctggagctcccttccctaatggacacgtgggtgctggaggcagtggcctgctcccacctccacccgcgctctgcggggcctctgcctgtgatgtctccgtacgtgtggtggtgggtgagcccaccgaggccagggtggttccgggccggggcatctgcctggacctcgccatcctggatagtgccttcctgctgtcccaggtggccccatccctgtttatgggctccattgtccagctcagccagtctgtcactgcctatatggtgtctgccgcaggcctgggtctggtcgccatttactttgctacacaggtagtatttgacaagagcgacttggccaaatactcagcgtagaaaacttccagcacattggggtggagggcctgcctcactgggtcccagctccccgctcctgttagccccatggggctgccgggctggccgccagtttctgttgctgccaaagtaatgtggctctctgctgccaccctgtgctgctgaggtgcgtagctgcacagctgggggctggggcgtccctctcctctctccccagtctctagggctgcctgactggaggccttccaagggggtttcagtctggacttatacagggaggccagaagggctccatgcactggaatgcggggactctgcaggtggattacccaggctcagggttaacagctagcctcctagttgagacacacctagagaagggtttttgggagctgaataaactcagtcacctggtttcccatctctaagccccttaacctgcagcttcgtttaatgtagctcttgcatgggagtttctaggatgaaacactcctccatgggatttgaacatatgaaagttatttgtaggggaagagtcctgaggggcaacacacaagaaccaggtcccctcagcccacagcactgtctttttgctgatccacccccctcttaccttttatcaggatgtggcctgttggtccttctgttgccatcacagagacacaggcatttaaatatttaacttatttatttaacaaagtagaagggaatccattgctagcttttctgtgttggtgtctaatatttgggtagggtgggggatccccaacaatcaggtcccctgagatagctggtcattgggctgatcattgccagaatcttcttctcctggggtctggccccccaaaatgcctaacccaggaccttggaaattctactcatcccaaatgataattccaaatgctgttacccaaggttagggtgttgaaggaaggtagagggtggggcttcaggtctcaacggcttccctaaccacccctcttctcttggcccagcctggttccccccacttccactcccctctactctctctaggactgggctgatgaaggcactgcccaaaatttcccctacccccaactttcccctacccccaactttccccaccagctccacaaccctgtttggagctactgcaggaccagaagcacaaagtgcggtttcccaagcctttgtccatctcagcccccagagtatatctgtgcttggggaatctcacacagaaactcaggagcaccccctgcctgagctaagggaggtcttatctctcagggggggtttaagtgccgtttgcaataatgtcgtcttatttatttagcggggtgaatattttatactgtaagtgagcaatcagagtataatgtttatggtgacaaaattaaaggctttcttatatgtttaaaaaaa

SEQ ID NO: 706 - protein, 123 aa, Homo sapiens [sequence omitted]

SEQ ID NO: 707 - protein, 150 aa, Homo sapiens
MVQRLWVSRLLRHRKAQLLLVNLLTFGLEVCLAAGITYVPPLLLEVGVEEKFMTMVLGESLHPPSFLFQIHATWHVGQEYLCPGSCLEGEVVCWEGIAGQEGDPGLRGHTKRKKRIPRTYPSHLWIPGPAQSLAHRRHWRNAPNLWLALL

SEQ ID NO: 708 - protein, 371 aa, Homo sapiens [sequence omitted]

SEQ ID NO: 709 - DNA, 141 bp, Homo sapiens
  misc_feature (1)...(141): n=A,T,C or G
tacggcgtggtgcggagggcggtaccccacaaataacacnnacaccccatcctatctgtgtccacanataaantgactcattcctctcctcgcatancccactntcccctngcgataccgtaacnaancccttcccccttt

SEQ ID NO: 710 - DNA, 196 bp, Homo sapiens
  misc_feature (1)...(196): n=A,T,C or G
cnatccttcncntacacccatgangtccatgtcgcacgtccacctcccctcaaaacttgggtccncatccacccgtcactctccccntaancnataaccccttttngcgaatagaccccaccttancaatnggtttttcnttttttgtccctnggnccgngcgattcaanaaattgaaggcccanaaaaaccccct

SEQ ID NO: 711 - DNA, 177 bp, Homo sapiens
  misc_feature (1)...(177): n=A,T,C or G
ntacntcnctccnaatgaaattcgaanctcggttacccgggggnattccgattaggngcgtantctcggatgtgcagtcacaagtcttttgctaatncttataattntcnctaccctttcttcnacaatactgctatcctanttnttctntcncctctctcccannttactaaccac

SEQ ID NO: 712 - DNA, 185 bp, Homo sapiens
  misc_feature (1)...(185): n=A,T,C or G
aaacgnaccanngccaacgatangtgttggngttggttgcggttgttcctcttatntgcactggttgtccgtgtcgcacgganggccacgtccctctgncntgagtancacatagcatccacgtttagtcgactntnccgggcggccgctctacccntntatngattcttattaaaantcggatc

SEQ ID NO: 713 - DNA, 172 bp, Homo sapiens
  misc_feature (1)...(172): n=A,T,C or G
nntggtcgcctgngcgtntactctaaaggatntactatncatatggantcnaanacgactcactacacggcnctctncggagccnnggtcagtgcctnctnggagaccttctctggggcaggangagcactnggtatgttcacgtatcncttcntaaanatacnnccctccg

SEQ ID NO: 714 - DNA, 112 bp, Homo sapiens
  misc_feature (1)...(714): n=A,T,C or G
nttgcgtgcctggacgtntactctgcangatctactactcatgngaattctaantacggactcactatncggcancgcaggcgcagcagggaangggtcacctcccagtctc

SEQ ID NO: 715 - DNA, 326 bp, Homo sapiens
  misc_feature (1)...(326): n=A,T,C or G
tactctanaggatctncgngtcatntggattctatntcgactcactctagggctcnagcngtcngccgggcaagttattcggatcgtcgggntccgagcttcgcaattaantgtgccatcgttctncaacgttcctgactnggaanccccngcngttcngatccncnggtacctagctccanntcccccgtnctccttctggngtntcatnaangaggaccnccctcgatcncccttccttaatctgcncacnctgaacgnccaatggacatngtgcgtttaatntannaggcccgnttcgngtgcccttcccgtnanntcagctc

SEQ ID NO: 716 - DNA, 122 bp, Homo sapiens
  misc_feature (1)...(122): n=A,T,C or G
nntgcgtcgcctgngcgtntactctagatgatctgantagtcatatggattctaatacgactcannatagggctctagcgnggatncngattcgtcntccngattcantgacnccggtanca

SEQ ID NO: 717 - DNA, 203 bp, Homo sapiens
  misc_feature (1)...(203): n=A,T,C or G
cntgcatgcctgcaggtcgactctagaggatctactagtcatatggatcgagcggccgcccgggcaggtgtnaatgataaanatgcatcatactancctacagaanggagagataatgttngntggaccangttggttttcttgcgtgtgtgtggcagtagtaagttattagtttttanaatcantaccgccctccgcaccac

SEQ ID NO: 718 - DNA, 168 bp, Homo sapiens
  misc_feature (1)...(168): n=A,T,C or G
ggcaggangatcncttgagccccngaggtcgaggctacagtgagccangagtgcactactgtnncgccctccgcatncacgngtggtccgatccccgggtaccganctnganttcactgganttctttttaancgtnttgantggtacnaccctcgantccctggctg

SEQ ID NO: 719 - DNA, 210 bp, Homo sapiens
  misc_feature (1)...(210): n=A,T,C or G
cancgtcgncataacacgtattttntgatnaagattctnactgacccatnaantctacntctcaagctcttncanngtccagtnaanggaatgtgtatnngtngggatnccacanaaaaaaganatntcggncgcttcattantcatccttcttacccanntctctngatncncagtntgancntgaacgcacactacnggatntctcca

SEQ ID NO: 720 - DNA, 131 bp, Homo sapiens
  misc_feature (1)...(131): n=A,T,C or G
tccatcctaatacgactcactatagggctgccaacctgccatccactactgaggaagacccgnanacttaggggctcactgcgagccaccggccacaggtcgtatagggcaaagcacgnggaagcacccct

SEQ ID NO: 721 - DNA, 121 bp, Homo sapiens
  misc_feature (1)...(121): n=A,T,C or G
tccatcctaatacgactcactatagggccgntgantnctggcgaaaggcttacaattaagnaggaaaaanganccaacaactaaaaaaaanncggncgtgncagcttngatgactngtcca

SEQ ID NO: 722 - DNA, 246 bp, Homo sapiens
  misc_feature (1)...(246): n=A,T,C or G
anctggagtcgcgcgctgcagtcacattgtggatccanaaaatcggcacaagctctcntggnttcntcgatatgaanaacactaatcccatgtngtntgngtctccgtgattcatccctcgcacnggtccccntccnaaccnttgcataggtgttatgttgtantctccccagtgcacaaagattnacactctctcantgtctganatatgcacgagttcattgtcctgtcnccgtnaacatcaag

SEQ ID NO: 723 - DNA, 160 bp, Homo sapiens
  misc_feature (1)...(160): n=A,T,C or G
cctccggaaaatccaantagagtaantncnctctaatccggggnaattggnggggtnnatacgtcctcctccccccagntaggattnanaaaaggnctcccagancaaaanctccaaagtgnatcnantagccgtncccganatncaacgcccctacgtc

SEQ ID NO: 724 - DNA, 156 bp, Homo sapiens
  misc_feature (1)...(156): n=A,T,C or G
tnanccnatatacaccaaattctgattctaaantcccacccaagggaaaaaagttgagaagagcctttccacttttctactaataaaaaaatgcaccagcccctaccannagtgnggaaaacctccttaggcccttgnntggaacaancgaaaatc

SEQ ID NO: 725 - DNA, 347 bp, Homo sapiens
  misc_feature (1)...(347): n=A,T,C or G
aganggttntatncatgctgtactcgcgcgcctgcagtcgacactagtggatccaaagaattcggcacgagagacggtgcgcgatggaccgagggccccagccggngaggcgccgccgccgagcccgcggncagacgccccatcagtagcgtccgcaccgggnagccgcggntctcgcccgagccgtgggcgcgcccgaggggcgggctcgcctcccgccgtccctcgcagctctgccgggcccgagcccgcgccgtcgccgccgccgncttgccgctcggnccgcgcggnccggnaaacgcggtcgaggtctggatgnggcanngcccgcncctntcgctgagcct

SEQ ID NO: 726 - DNA, 162 bp, Homo sapiens
  misc_feature (1)...(162): n=A,T,C or G
ttgggtgggttgggtgggggnaaatttncccatttgggtgggtttgggggggnaaatacttcccgccttttnggtncccaaaganacnaagggggagtcccttnatagaggnagngcgatncntcncaacnacntngactttgnccatggggagnaaggtgg

SEQ ID NO: 727 - DNA, 120 bp, Homo sapiens
  misc_feature (1)...(120): n=A,T,C or G
gtgtgggtggggaattccattgtggttgggggnaaatctccgcttgtccaaagnacagggggggtcncttanagngnagggggttcctccccaccacttgncttgnccattgngagnaag

SEQ ID NO: 728 - DNA, 130 bp, Homo sapiens
  misc_feature (1)...(130): n=A,T,C or G
gacccactgcagcgttnaacttagcttggaccgagctcggatccctagtccgtgtggtggaattccatgtgtcgagagaggggcaaatacnctccaanacancnccctcatgctcnacacatattcgcat

SEQ ID NO: 729 - DNA, 182 bp, Homo sapiens
  misc_feature (1)...(182): n=A,T,C or G
cngactgctngcgtttaaacttaagcnaggtaccgaacggggatnnacgactantgatcggctggctgcttccagtcgattanatttgtgaaaaagctgaaccncngccngttaagggggannatgcaaaanatncatccnnctgccccntaaactgntctntccnagggaaaaaanggaag

SEQ ID NO: 730 - DNA, 678 bp, Homo sapiens
  misc_feature (1)...(678): n=A,T,C or G
cactcncactccggacctaggcncttcaccactgctctcttcctcctcctcctcctcntcctcggggctgggggaccttccccagtgaccatctcactttggctgaancccactcggggcagcctgagtttggggctcttggccttctcaccctcctcggccccctccttggcccgcaccaggccaaaccggggcagccgtaccttgagcttgtgtccggcctctccctccccctctgccacctggtactcggcatggttgcccccgggatggcgagagctccacgtcgggcagtgagaagcagaaagtacgctcggcccctgggggctgctcctcagcaccctcgccccccaccctagctctggcccccagtgtgggcaacttcagcctcagcccaccctcgcctgtggccgcctcgcccgcctgtgcctctcggcttagccccacgtccaactcaagctggggcactgtcacggtgggcatcttaaagacaccctcacccaccagcagctcaccacctgcaacctgggctccaggcaaaaaaagggtcacctggggcanctgaaccctgtacctgctgtgccctctgctgaanggaatgttatctgaacctgctgccctgggggtactgccttcccaaaaccgggtcaantccacctgttggaaggnaaatncccc

SEQ ID NO: 731 - DNA, 135 bp, Homo sapiens
  misc_feature (1)...(135): n=A,T,C or G
gagatccgacgtcacccccttccggcggcccaagacgctgcaactcccgaggcngcccaaatatctttggaagagcgctcccagcccaacacaatggaattccaccacactggnntagtggatccgagctaagcc

SEQ ID NO: 732 - DNA, 660 bp, Homo sapiens
  misc_feature (1)...(660): n=A,T,C or G
gcttggtaccgagctnggatccctagtaacggccgccagtgtgctggaattcggctttcttcaatcagntnacgagctgcatggtctgctaacattgtcataattgctggcatagattactgaaaataaagaaaaaaaattgaagctgcctatcaagttttggtattatcaaaaacttcctacaagttattttacttcaaccatgttattacaaatattttaatgaatactttagagactttaattacaaaaaactgagatagtaaaagcaagtaataaaagctgaaattacttagctatttgataattacataaattattatggtccattcaacttttctagtgtttagtttatacaccaggaagactttcctattctactaacatttataaagtatgctaacctattatttaaacgcatccactattaggattttatggcctaaaacgtgatacagttcagtatcttgatgtcaaaactttttaagcaagtagggattaagttcaagtgaatgtgattttctttcttcccagtagggtcttctgaataactcagnaaagctcacttccattatcttactttataaaaaaatgctataagacagaatgggccgacgtggnggctccacctgtatccacctttggaggcgagnggcgaat

SEQ ID NO: 733 - DNA, 836 bp, Homo sapiens
  misc_feature (1)...(836): n=A,T,C or G
aattaatgactttttttccgccctgccaagctagtttgtctaaatataatgtaaagaaattagctactcattttctggtccacgaaggttcctaaaatgggaagaagtggagatctgaccttgttagttctaaatacactaaactgggagtgccatggatggctttcaggatgtcctgaatcctctataattgtatacaaaatcgtgagtttttaaaaactgggttagagctattggttcctcagagtctcaggcatcttagacccccaaaaaggttaaggactactgacttaaccaattaggtttgagtggcattggctttgaagaaaagcagaggaaagatatattttataattctgggcaacaaaaaagtggatgtgtgccagcatcttagagtagaatcctcttaaaaggatagcactgcatatgaactagtaggttttaaccagtgcatatttaggcgaagtagctcatttttctgttagaattcttttttatttgggaatgggcaagcttttacagcttttaccttgccaatgaatacctggaatttaaaaaatcttgttaggcatattgcccataaagttttttttcctagatcatatattcagtaaatatgtttgtagctttatttcaatcccccaattcattgagggttgaaacaatttgaatggtttgagtgtagaagctaagttatttctgtagaggctaagggcatttataccaanatatgttagacttgnggntcctgttaaccatgctgtanacaataggaattactgtatatccacattttaattttaacatcttctgctttgntgntggtttgagangga

SEQ ID NO: 734 - DNA, 694 bp, Homo sapiens
  misc_feature (1)...(694): n=A,T,C or G
nagtnctatttncactaaactgngagtgccttggatggctttcaggatgtcctgaatcctctataattgtatacaaaatcgtgagtttttaaaaactgggttagagctattggttcctcagagtctcaggcatcttagacccccaaaaaggttaaggactactgacttaaccaattaggtttgagtggcattggctttgaagaaaagcagaggaaagatatattttataattctgggcaacaaaaaagtggatgtgtgccagcatcttagagtagaatcctcttaaaaggatagcactgcatatgaactagtaggttttaaccagtgcatatttaggcgaagtagctcatttttctgttagaattcttttttatttgggaatgggcaagcttttacagcttttaccttgccaatgaatacctggaatttaaaaaatcttgttaggcatattgcccataaagttttttttcctagatcatatattcagtaaatatgtttgtagctttatttcaatcccccaattcattgagggttgaaacaatttgaatggtttgagtgtagaagctaagttatttctgtagaggctaagggcatttataccaagatatgttagacttgtggttcctgttaaccattgctgtagacaataggaattactgtatatccacattttaatttttaacatcattctgtc

SEQ ID NO: 735 - DNA, 126 bp, Homo sapiens
  misc_feature (1)...(126): n=A,T,C or G
ncnttgaaacnggttgaccagacttcaggcctgtgcgctcaatcgtggagaatctcgtgccgaattcggcacgagtctctctctctctctctctctctctctctctctctntctctctctctctct

SEQ ID NO: 736 - DNA, 165 bp, Homo sapiens
  misc_feature (1)...(165): n=A,T,C or G
cagaagcctttaaaccggttngaccagacttcaggcctgtgcgctcaatcgtggagaatctcgtgccgaattcggcacgagtctctctctctctctctctctctctctctctctctctctctctctctctctctctctctctctctctctctctctctctctctc

SEQ ID NO: 737 - DNA, 125 bp, Homo sapiens
  misc_feature (1)...(125): n=A,T,C or G
ggnagcccctttaaccgtttgtccagacttcaggcctgtgcgctcaatcgtggagaatctcgtgccgaattcggcacgagtctctctctctctctctctctctctctctctctctntctctctct

SEQ ID NO: 738 - DNA, 137 bp, Homo sapiens
  misc_feature (1)...(137): n=A,T,C or G
ggagncncttgancaggatgaccgacttcaggcctgtgcgctcaatcgtggagaatctcgtgccgaattcggcacgagtctctctctctctctctctctctctctctctctctctctctctctctctctctctctct

SEQ ID NO: 739 - DNA, 970 bp, Homo sapiens
  misc_feature (1)...(970): n=A,T,C or G
aggcctatttaggtgacactatagaacaagtttgtacaaaaaagcaggctggtaccggtccggaattcgcggccgcgtcgacggcccttngtgccactagntctttcattcttcccccccatcaatcagtgaactttttagcctactcaaagctttgctccaatgcataggatttatgattgtggggatttccagataatataaatattcaacatgaatattttaaattaaggcatgagacatttttcctaactgagcatagccatgaacctctcacgtctgttcctctgtgtcagtttgtancactgaatacagcagccctcctaaaagtccaggcagtgcacaggtcttgacatgatgaagtgacgtgttgctatggtgattttgcagctggccaaatagtcactggttgattttacccagcaggagatttttgcaaaaatttcctgggtgagagtgaaatcaaactcctattttgnttctcctctgcaagctgnagttaagatggattaatgagtacttttagattaattaactctgaagagaaaatgggagaaaagtgaggaaggttgttggcagaagtcattgctggaatccttctgaagggagtactgacttcacttgcaaagacnagagactanaagacaatgaagttaaacttggcctgtctctcatatgatagatgctgagagtcaggntcagggaaatttaattctgtcatacgcatatnggattatgtggtcatggatttgttggcactaaccngcctntaatcagnataagaaaagtgttttggtaganaaagaaaattatggcccagaaaaacctggaanacttggaaaaaatgntngggggccttgggtggtggtctnaaaanaccccctggggatntttaaaccaaaantgaagaagggaaaaatntttccccntntttttnttttttgcccccttgggattggnttttntttcc

SEQ ID NO: 740 - DNA, 739 bp, Homo sapiens
  misc_feature (1)...(739): n=A,T,C or G
gntgtcnaaaaagcaggctggtaccggtccggaattcgcggccgcgtcgacggcccttggtgccactagttctttcattcttccccnccatcaatcagtgaactttttagcctactcaaagctttgctccaatgcataggatttatgattgtggggatttccagataatataaatattcaacatgaatattttaaattaaggcatgagacatttttcctaactgagcatagccatgaacctctcacgtctgttcctctgtgncagtttgtagcactgaatacagcagccctcctaaaagtccaggcagtgcacaggtcttgacatgatgaagtgacgtgttgctatggtgattttgcagctggccaaatagtcactggttgattttacccagcaggagatttttgcaaaaatttcctgggtgagagtgaaatcaaactcctattttgtttctcctctgcaagctgnagttaanatggattaatgagtacttttagattaattaactctgaagagaaaatgggagaaaagngaggaaggttgttggcagaagtcattgctggaatccttctgaagggagtactgacttcacttgcaaagacaagagactanaagacaatgaagttaaacttggcctgtctntcatatgatagatgcttgagagtacaggntcagggaaattttaattctgncatacgcatattggattatgtgggtcatggctttgtttggcncctaacc

SEQ ID NO: 741 - DNA, 1171 bp, Homo sapiens
  misc_feature (1)...(1171): n=A,T,C or G
gccttgnggtgacactatagaacatgtttgtacaaaaaagcaggctggtaccggtccggaattcgcggccgcgtcgacggcccttnntgccactagttctttcattcttcccccccatcaatcagtgaactttttagcctactcaaagctttgctccaatgcataggatttatgattgtggggatttccagataatataaatattcaacatgaatattttaaattaaggcatgagacatttttcctaactgagcatagccatgaacctctcacgtctgttcctctgtgtcagtttgtagcactgaatacagcagccctcctaaaagtccaggcagtgcacaggtcttgacatgatgaagtgacgtgttgctatggtgattttgcagctggccaaatagtcactggttgattttacccagcaggagatttttgcaaaaatttcctgggtgagagtgaaatcaaactcctattttgtttctcctctgcaagctgtagttaagaagggattaatggagtactttttaagaattaaattaacctcttgaaagaagaaaaaatgggggaagaaaaaaagtggaagggaaaagggnttggttttgggccnaaaaaaaagttccaantttnggcnttggggaaaaattccccnttttccttggnaaaaggggggnaaggttaanccttgggaacctttttccnnccttttnggcccaaaaggggaacccanggggaaagaacctttaggnaaaggaaacccatttgggaangggtttnaaaaccnttngggcccccgggccctcctccaanaagggaaaaaaaaaggcctggaaaangtaccagggtttcangggnaaaanttaaaattcttggccaatancnccataattgggaattatgggggggccatgggcttttggtttgggcncttaaccccgcnttttaaattcaaannaaaaaaaagnggtttggaaaannaaanaaaaaaaattnaanggncccnaaaaaaaaccctggaaaacctttggaaaaaaattngnnggggggccntttggttgggggggtttnaaaaaaccccctngggggttttttaagcccaaaagggggggaggggnaaaanggtncccttnttttttttttnngccccccttggggaatggnttanttcanggggccc

SEQ ID NO: 742 - DNA, 739 bp, Homo sapiens; identical to SEQ ID NO: 740
  misc_feature (1)...(739): n=A,T,C or G

SEQ ID NO: 743 - DNA, 610 bp, Homo sapiens
  misc_feature (1)...(610): n=A,T,C or G
ctgtccttatttctttagcaaaaatttcccaagagaagaattgctgggataatgcacatttaaatttttgatagacattcccaaatattatacctgtttttgagacctttaattcctgttgtcaaattgccctatatatggagtaataaacacgatttaaagaaatgaggactaaaaaaagattatatataacccaacataaaggcaacctcttaggcgttgacagaaactgacaactttttatctgtgggtgcgatccattataagtaacctgagcaccttattttttctttttaaactctaggtaggatacccgaggtccacaaatttttcataagaaatattttttctctgccctatgagattttaaaaaatattatactgcttcaattgcatcaaaagaaatggaccctaatatctatgatgaaggatttggagttagaagacctgagtttcaattttggcatggctgtttgtctagctctgngatcttggacaggtcaattgacttggcttaatcttctcatccatttagnggagacagcaccactattcacaggactattgncngaattaccagacaatagcataggngaaaatataangcctt

SEQ ID NO: 744 - DNA, 127 bp, Homo sapiens
  misc_feature (1)...(127): n=A,T,C or G
ttnacctccctggaccgggccccccttccccgggcggntcccccgggctgcaggaattctgcacgagggagagagagttngagagagagagagagagagagagagagagagagananagagagagag

SEQ ID NO: 745 - DNA, 458 bp, Homo sapiens
  misc_feature (1)...(458): n=A,T,C or G
gatatcccgggattcgcggccgcgtcgacgtggcctctagtttgtcctggtccaaagcagggaagctgggctacgtcctgcccaggtcagccttaggttaagggctgcctgggggagggaacttcctgggccttcgggtctctgtgcactggggtggctcctgtggcccagaatgccctggagaagggtcctactggaagcgaaggtgcagggcagcagggcctgaggcgcaggagctggtggaggctcccagcacaggtcgccgccccagtcacatcactgctgatggtggggggacttggggagtttcccccgagaatgggaggtctcacagtccccgtgctgcaatgctgtcggtgcactgngncngcaatgtgctcatggncacttgctttttctctgtggccccggccgatttatccagcanngcacccctcttctnctctccgganaaagcc

SEQ ID NO: 746 - DNA, 893 bp, Homo sapiens
  misc_feature (1)...(893): n=A,T,C or G
aagcaggctggtaccggtccggaattcgcggccgcgtcgacgtggggagttagctctctggaccccgtcatagagtaagtcatcgatagagcatttgcttgatggggacttccagaaggccanngaaagtcctgccgacttcctggggaagcccatccgcacgtggggtgagggtccccanatggaagcagctgtgtatgcagggagggggcagaggctgctgccaatgggcatgtcccttacctgaaagggccacctctccaggtgacatgtcctgggggagccggggccgtctgctccggccagaggcgctcagctcaggccacaccaggcagggcacctcccaacctggacaggtggggaccaaggtggccttggacaaaactctctgtgtttgccaagcacccaatcggacacagagagtcaaccacaccccagtcacatggtgtccacacngcaggggtcaaggaggcccggcccctccccctcagacgtccctgggcctctgggagtcagcaaggacgaggacggcattgcccttcgagacaggaagggagtgacctcctcccggcggcatccaggctcngcttctccggagaggagagggggctacttgctggataaancggccggggccacagagaaaaagcaaggtgaccatgagcaccttgcaaacacagtgcacccaccagcatttnagcaccngggactgtgaagacctcccatttcttcggggggaaacncgcccaangttccccccaccntcactagtgnattgtgacctgggggncgggccgacccctgtngcttgggnnagccctccncccaggtttctnnggcngcccnttaanggnccctngnttggccccttggccncctttncgcttttccca

SEQ ID NO: 747 - DNA, 738 bp, Homo sapiens
  misc_feature (1)...(738): n=A,T,C or G
gatatcccgggaattcgcggccgcgtcnacgaagcacagacctgngccctgctctcatggggcagactgccatttgtcattnattactgaaggaaagggatcctcagtttgcttgtggacatttcaaatttgaggtgagagttggataagtaagaataaagctgctcttcaaagagatgaatatagaaaaagaaacaagatacagncttggcagtaaggctgggaggaaggggaaaaggtaataaagaatgaaagagtgagaaatgtgagcaggagctgaacacagaaaagttcagngacagaagcanaaggagggaagaagggaggagggtccctttcacagaggctcacgaggatgctttatgngtgccatgcagtccatgttcaggatgtctgcttcttanctctctacttttctaatanaaatttggatacttactgatcctacatatgtaacagggagagaaggtgaatttcaaagcantaaattgaaaaattgttcacaatttcattttttaaaaaaagggagctaacagaagaagaggttaatgtggtaattataggatgnctcttgcgacacatgaatgnatctggtatcatctgagtgggaggggagctgtcttcctgacccaaaaggatcctttcgttanccngnacttangtcccaaaacctcaccaccttggagaaatnatttccttttgggggtntcattaaanccttttggnccccgcaaaagc

SEQ ID NO: 748 - DNA, 647 bp, Homo sapiens
  misc_feature (1)...(647): n=A,T,C or G
ctntgtggcggtggctgtctcatttgggtggactttttgggtcgtaggaacctggtatngaggtcgagagtaagacgggctattagtagtcgcatcggagttatttgtgaaaacctggttagggcctctgtctccgctgcgctcgcctaaattggtatggctcgacttggaaacacggttctaacacgcgttgttagcgcccttgctagcatgtgaaggacactggccctaccaagaaagattcgagtcgctccttccggtatcgttcacggaggcgatatttactcttcttactacggttacttcgagattgtctgtgaagtttaagactactaaaaagagtattaagcctatcgggaattagctagatcgacacgctaaaaccaagggcaatcggcggaaatatagaggcaccaataatagggcctacagaaggcccgagggttagactcacgtttaataccggccacgggagaaataaaaagataaagtatacatcgtttagcggtcctcggaagccttcggctttaatgccaaggagtcggaagcatcgtcggcgagtaataaactccatcgcgccgagactatctacgacgccctccttaanatccgtaaattactcccggaaagagtatttaggcggctct

SEQ ID NO: 749 - DNA, 642 bp, Homo sapiens
  misc_feature (1)...(642): n=A,T,C or G
ctntgtggcggtggntgtctcatttgggtggactttttgggtcgtaggaacctggtatgcaggtccgcggagcgtgggctctcgtcgtggatgttgggggttggtgtggtgccggttgtttttggttctgttgagcgtagtgtgtttgaaggttagcgttcgtgtcttgcttgtggtttggtgtttagggcgggtggggaggttgttgtgtagctgttgtatgtcatattgttggtgttgctgccctgtgctgtttgtccttggttattgtggttgttaccccgcctgtgtggaagtgttgtggcagggcgggaatttaagtgggagagttgtgggacccgtggttgttgttacgttgctgcttttgtcgtgggcggtggcggcgcgtctgataattagaattggatacggagtgtataatacttctagtaaatggggacctagtgcttgacttcccggaatagggatctatgcgaagtccttaggatagtctttgataagtttaacgcccacgaccctaaaattatacacgattagacgcataacgactcctccaggaaagataaagaatctcacatatagaacgggaccccatacacgtcggataggaaacaagagaactaattttngttaaaaagactt

SEQ ID NO: 750 - DNA, 639 bp, Homo sapiens
  misc_feature (1)...(639): n=A,T,C or G
tttgtggcggtggtgtctcatttgggtggatttttgggtcgtaggtaacctggtatngaggtatagatgccgattggtcccgacgagcgtcacgataaattcggtagtttcgccctttttagaaggcgctagtactcggaacttcacttcatctcggtagtttactttggcgtatatagccttctccctcgaagactagccgtcacattcgttccctaggaatcgtttctgcccctaagaatccgagagcgagatcccgaaactagaggaaccttagaagagtcgtatttccacaaggaccccacagtcattccgggaaaatccctaggaccatacggttaggattcccccggaacccggagcaaagctcatgatttcccacaccgcgagagcgcctataaccctatcccatttcttcgggttatcgaggatattacgatcaagccgagagaaccgctagaaccgctttcttcgctttctcacggaacctataagtagaaagagaaactcaggtcttaagggggcgcttcggctaacgaaacttctacttacgaagagagtatctagacattaagtcataaaaatccactacgcacctcgtgtacgatatcatcgggagcggttcatagacggtgtccg

SEQ ID NO: 751 - DNA, 637 bp, Homo sapiens
  misc_feature (1)...(637): n=A,T,C or G
cttttgtggcggnggtgtctcatttgggtggatttttgggtcgtaggnaacctggtatngaggcagctctgagcccccccccccccccccccccccnccccccccccctaggnggttgggaanacggtggatacctaaatcgagtgngttcattaaaagtagttgattacnccctaaaataanaanagggcttcgtcggganaaatcggtaagganaagtctttntggcatcataanaatactggctcgggtcctaanatntttaaggnggtcnccgagggtnttcataccgataanaaacgttttcctatcggcaacgggcttacctgagggnggacttctcncggngcggngattnanacgaanacgtagaggattnccgntacttnttganatcacncgtatcatacttgtaagcataattntcctgaaaagtgttataanaatacgcncgcatattcgctttttcgtcctagggatgcttaaatggcgatactgctatagcgggtgagcgttggttctcgagnaanaaagcgtgtcctaatgcgtctaaggntttaaggncgttggtttaaaaatanccttagaaacctcgaggcggatactggtttntttttaacgaaacaaagcaccccnn

SEQ ID NO: 752 - DNA, 644 bp, Homo sapiens
  misc_feature (1)...(644): n=A,T,C or G
tntgtggcggtggtgctcatttgggtggatttttgggtcgtaggaacctggtatgaggtcttgcgagttgttggtgtgtcctgtcgttcggtggttcccttttgagttgagtttgtcctttgaggttgttagctgctgttcgtttgtgttcgtgtagtgctttgggttgagagggttatggtggtggttacggtgtattgtcgcccgtggtcgcggggttggggtggtcgtcggttttgtggttcatagtagtcttctgcgttcggtggtgcgggtttgggtgagtagtttcgttcttggatgtcccattgacccgccataatctaagtaagggttagtagaaacctctccccgatagacacaaccgtcgtccactaaagacctcgcctctgatttttaaaaggacccgaaaaacatcccttcaacggaaaaaacggaaaaaaagtcagcgaattcaaagaagccacgggagagaaaaaagaactaaagttagtccgtcattatatgtctcctcggaggaggaagcggcggtggcggaaaatgaggcggtaagaaagacgacctctatcggcggcttangccctaaaagggcgataccttacgggatgataaggaccctaggacgcctccttctcggatcgtcc

SEQ ID NO: 753 - DNA, 635 bp, Homo sapiens
  misc_feature (1)...(635): n=A,T,C or G
ctttgtggcggtggtgctcatttgggtggatttttgggtcgtaggaacctggtatgagggaatcagctcgacccccccccccccccccctccgaagcagagcccaacccaaagtccaccgactacccgagtaaactctcggagggtagaataagaaggagtaggtcctagccaatagaagtagttccgagccgttaggacagcggacggaacattnaagaaagagcctatattagggaggaagtaacgttcctctttcggagctctttaaggggtagtcccagaacaagggaagaggacccgtcggctattgcccgtcgatacgggctctcacggngagcctaggttcgaggatagggccgctcgtaaaattatacggtttccgagaaacgcttccgtagaccgggtcctaaatcgtccggagtattnggagagggatccttcggaccctagggacagagagaggagaacggaggttacaggaggagaacgtntcctcnctagttttctttangtcgaaaaatttcttaccgatagggttcctagggtcggngaatttacggttcgaaaaacggtagtncctaanggntgntattnggggtagtatcgggtcgtttacaantcgtccgtcttntg

SEQ ID NO: 754 - DNA, 721 bp, Homo sapiens
  misc_feature (1)...(721): n=A,T,C or G
accggattngttnctgagcgcgtgactgctaataaaaaagatggantgccatctttttttttnccttgctttatatatccagcagcaaaacaaaattgttctgcngggctataaaatttggcttgtgagtcntgtacacaactcaggagtgtgacacagctaccagctttcctcctaactctcaagggaagaaaattcaagttctgtctaggctcactctgtaaagtgggaaacttgctggttttgtaggctttttttccccttctttccctctctcagcttctccctgcttctcagaanatggagttgtgatgcctgcaacttaccaaatttatctatgaatcagattccagtgggagacccctaaagcagagggagaataaggagttctccccatgatggaaaatatccaaagacaaggtttcatggagcaaagaattctggctagatttggtttgtaagtggatccctccccactgcgtgtacactttatctgtctctttgcttcttccccaccctctttcccagctctctctctgtctctctcttgntcccctgacccttttttcttcccantgcatacttttttntttcccttttttaatcttctatantcttaancctaccaangggccctcntgannaatttntcacccctgaataggggattctntangccctgagaatttcnttatcanaaaaatatttttttaaagcatta

SEQ ID NO: 755 - DNA, 721 bp, Homo sapiens; identical to SEQ ID NO: 754
  misc_feature (1)...(721): n=A,T,C or G

SEQ ID NO: 756 - DNA, 873 bp, Homo sapiens
  misc_feature (1)...(873): n=A,T,C or G
ggaagaatacagtaagtttgcaaattaaaatttctctatttttctgttatttattcatttggaaactgtcagcctgtctctttcactttgggcaagtgaaagcaaagacgtccagtcctatcagcaattaggctgaaagtcaacgccaagctggcgggcaagggctggtctgagtagaggttccctaggcaggcaagagagagactcccactcgatactcccagctcggcaactgcctgaatgccaatgagcactcattataacccgccctattttataggatttaattttacacttcaggcttaatcagtctgaaagttaaactgacagtgttaagttacggaatcaatgacatttaggctttatgactttgtagctgaatatctatgggctatatttccattctaacagtgatatcctgttccagaatctcattctttggtgatggcactttctagtggagcagtcatggtaacagtccacacccattaccatgtgggtgctttacagcatactgacggaaggactgaggagccaccggagcaggagttcctctcagggaggacgctgacacttccacagctgcctangtatgggcacctgatgccaacgaanaacccaaagcgctctcccttccagatggaagctgccccacactgggctgacagcatctggagctgctctggctcaaatcccggaatcgcacanctcctancgggggcgtttanagatcctcngggccagctaccgaccacttttgacaagggncttaggagcgataactagnctggcgcgttacacncggatggaacgtcttggacttgagacctcttggggganatggcncccccaaataanttgggaaaantnggg

SEQ ID NO: 757 - DNA, 782 bp, Homo sapiens
  misc_feature (1)...(782): n=A,T,C or G
ggcccctcgagggatactctagagcggccgccgactagtgagctcgtcgacgatatcccgggatttgagaccaggagacagctccagatgctgtcagcccagtgctgggggcaggcttccatctgtgaagtggagaggcgctttgggcttcttcgttggcatcaggtgcccatacctagggcagctgtggaagtgtcagcgtcctccctgagaggaactcctgctccggtggctcctcagtccttccgtcagtatgctgtaaagcacccacatggtaatgggtgnggactggtaccatgactgntcccttaaaaggtggccttcccnaagaaaggagaattcttggacnagggatttcacttgnttagaaatgggaaaaattacccattagaattttcgnttccaaggcntnaagncctaaaaggcctttgattcccgaaccttaaccctgggcagttaacctttcaaacgggataaaccctganggggaaaatnaaatcctttaaaaaagggggggtttnaaggagggctctttggctttcaggcanttgccaacctgggaaattcanaggggaagtntttttttttgcctgcctagggaacctttacttaaacnaacccttgnccccccatttggggttgactttcancctaattgctgaaaggaccgggccgnttttgntttcctttgncccaaaggnaaanaaacgggtgccanttcccangggattanttcccgaaaatttggnnaatttttntttgnaactttttgggttttttcc

SEQ ID NO: 758 - DNA, 647 bp, Homo sapiens
  misc_feature (1)...(647): n=A,T,C or G
ntttgtggcggtggtgtctcatttgggtggactttttgggtcgtaggaacctggtatngagggaagagcgccgtcggtccgagtacagtatggagtagtatagtcttcgcgccttctcgggcggcggggctattctctccaaaggcagaggtccctagtcgacctcgctcccctaggttaggaacagccgtcgaatattttaggttcgtcgaggctttcttccgagctctacgcctaagtagctccgcgagcaaagtatcggtcattttcccctatccatcactcccctaagtacgcctcattattccggaaggcaagaggccagcattcctccttagagtagagggtaggtacctccgtcgcgtgccgcgaaagggcagagcttcgtgtcttccctccgcagcagcttaacggtctacgtaggcgttctcgatcttttcacgggaatcggggtccgggagggcggcggaaaacgtcgacgtctcggtcaccgtcaccgccccgaacaactagcggctttccgctttcaactgaggaaccccgcacccctcattagcgcttacgaaatcggggangtgattgcgccaattcgttagccttcgataattattctctattagcggtcctatctcgcgctttcgatttat

SEQ ID NO: 759 - DNA, 657 bp, Homo sapiens
  misc_feature (1)...(657): n=A,T,C or G
ctttgtggcggtggtgtctcatttgggtggactttttgggtcgtaggaacctggtatngagggctctatagaaagcctcttgtctttagatacgggctttctggtccttcgttctggaagtgtagtagtaggtactgcgggaaggcgaagagtcctttcaaggacgatttacttaagttggcttattctatagttccttcgggacataaggtcggtacgatctatactgcgtgggaagctgataggttgggacttaaggcgaataagaaggaggcggcggaggtcgcgattaccgcagagatattatttacggcggccgcgggtaccgcgggtcatgcggaaattttctgaggttcttggattcctaagatcgctcccgtcgagtatactagcgacgaacgtaagagtgccctcacaagaaccggtacaaactcaagaagaagttcccattaagcatcgtaagaaacggtaggacgaggacggtaagaagtaatcggagaaaggatcctagtngttacgaagaagcatcgttnagctactttgcgctaccgtttatatttagacgtgttccgtccttctccgtgtttanaaaaaaggtttattccgacgggagacttaggcgaatggagggttccgcggttganaatcggancgggg

SEQ ID NO: 760 - DNA, 644 bp, Homo sapiens
  misc_feature (1)...(644): n=A,T,C or G
ctttgtggcggtggtgtctcatttgggtggactttttgggtcgtaggaacctggtatgnaggaaaagaagtaagcctcgaagcctatctccgaccgtatttatttcgcagaagacggaactacggacgtcgttaaccccgagtagcccccgtaagaaaggactaaagcgaatggaaaagtcgggaattccggcggaggggcggcgattactgaaaggagtaagagtaagactattgcgatacttgaggcgttccctcttaaaaggcacccgaaacactctattaaaaaacacccgaagaagaacaactcatgcgatcggccgtgtgcagccgtcaatagtaaagagagccatgaaccatgccatccttagaccaattaggatgaagaagaggaggaagatgaggaccaaaccctacccactcggaaaaccccgcacgagcctccgaacaaaatccgggaattaaaacggcggcccacttccgcactctcgtagcgcggaccgaatagaaaaccggaaactacagctaaagggtcctttccggcctgttatctacccacccgcaatccgatcctccccccccctcgtccaaaaaccctaacctctgcggcaacattagagcagaaggagagggcgatcccttgan

SEQ ID NO: 761 - DNA, 647 bp, Homo sapiens
  misc_feature (1)...(647): n=A,T,C or G
ctttgtggcggtggtgtctcatttgggtggactttttgggtcgtaggaacctggtatngaggcgggtactctctgggataatcggtataagtgttgtaaaattgggggtaagagaaagtttcattataagaagtggaagcacgagccggggtgtttagtcgttaatattaagaccggtttttgttgtacttatatagcttgcgcgtggggaggcaataagaaacattgcgtttcgaggccggatgcggggaaccctcttcggggtctagagcgccgcatctgcaaaataaggactactgacgccgctcataacgtactcaacaatgagtcggcctgcattaagatttcggcgaagaaccgtactgcgtctactgatagtatattgcattgatagcggcatgagctttatcacgtgtcgttttcgggttgtaagaagggagttaagtcgatcttcgaggaagaagagaccccaaataaaaaatgactcaaaaaaacctagaagaaacacgacgaaaggaaaaagaacgttaaaactagtagctcttcggangagtagccttagtagggtaagtcctccgtgcgtactgtcctaaggtttggatagcgcggttgaatagacggtcacgcgtcagaaggtaaaaanccgg

SEQ ID NO: 762 - DNA, 628 bp, Homo sapiens
  misc_feature (1)...(628): n=A,T,C or G
cattgtgttggggtcactgagcccacttttttccagattttttgtaaaattgtttcgcattgtgttccctttattcgcttgtattaatatttgcgtagtggattaaacaaatacttggtgttgactgtcagtcttagaggactgactagaagtagttttcatttggggctcaggaaatacctactttatatttctagctaattaggaaagtcatttttcagttaggttggtgttttggttcaggcactcgctagctagatgacctaacatgctacttaatttctgagtgtttgtgtccatccctgtaggattgttgcggggttaaatgaaattgtgtatatttgtaaagcatttacctcagtgcccagactgtgacagagtagattattaggcttgctcttatttctgtgattaaatttagtgtcagattagcaacctatagctacttctaaagctgctgctgctttctttgtttagggttaggaagaaacatgctggacagtttgccaaatgagagttacatgatgtggcttgtgggaacattctaacttggaacttgcccatttccaggactttgnggttcanagatttttggggatagatgtaagggttaaaaaaaacngaaaac

SEQ ID NO: 763 - DNA, 147 bp, Homo sapiens
  misc_feature (1)...(147): n=A,T,C or G
cattgtgttggggcagagataaataattcctctgaaaagtgttttattggaatttcaaatgaaaagctaactggataacttacagcatgtttctgccaataatctcttanaacaggcctcttttttttatgcacaccaccttcnggc

SEQ ID NO: 764 - DNA, 146 bp, Homo sapiens
  misc_feature (1)...(146): n=A,T,C or G
cattgtgttgggtatgttttttgaaggcaggtggacaggatttgctgatgggtaaatggcagagttagggggactgttagaacagagaaaganatcatggggttgggtttgagtctgatgnnnaactggtgccgnntgctcagtat

SEQ ID NO: 765 - DNA, 129 bp, Homo sapiens
  misc_feature (1)...(129): n=A,T,C or G
tncncgattcgntnctagcgtntacactnatgtcttggtaccgagctcggatccactagtccagtgtgggnggaattccattgtgttggggcaggaggngctttgngtacngtgcggctgnagaggcgg

SEQ ID NO: 766 - DNA, 175 bp, Homo sapiens
  misc_feature (1)...(175): n=A,T,C or G
cattgtgttgggcctagtccgaatacttttagtaacttcagacagatctcctcatctctttctggggcttggnttttctcctttgtanaatgatgcctttctgtggttttgtcatttctaacattctgtgngtgatgaggtgtatattcganganctctatcnccanagtactct

SEQ ID NO: 767 - DNA, 602 bp, Homo sapiens
  misc_feature (1)...(602): n=A,T,C or G
nnntttaaaanctgtnctccccgcggtggcggccgctctagaactagtggatcctttccacctggtttgttttcagtgtttaatcctattagtatcagcaggatataggtcaggatatcaggtgcagaacctgtggaatcagccaatttggcttgctcatttactttaataaggtcccataatgagtgagagtacaaagttcaagccctgttgagggtctgcattaaactctcagaagtatttagagtgtgccaggagccgcgaaggtctggttcgggtggtggcgggaactgtattagagtgctaggcacggcgcgacaaagtctgtccaacccaaaacggtgctgaggcgttgggtgtgagctccagtactcagaaaagcatctcagcaggtactcaacagatcctcaggggcttgggggcccagcactggcagtgagggcatgaaagacataaaagggcactacctgtgggtattttctgttctccaaggaggaagtagcaaaaattaggacgctggaatatcctatgttgtagcaatcccagaacaactgatgctcaacaaataccacacaaaacaaattttttaaaatttaatctta

SEQ ID NO: 768 - DNA, 671 bp, Homo sapiens
  misc_feature (1)...(671): n=A,T,C or G
tccaccgcggtggcggccgctctagactagtggatccactagtccagtgtgggtgggaattcgcggcncgcgtcgacaaaaatactgctaaagtaatatttttatagatgactatttgccttggggccaggaaaagcagctggagttattcacttagtaccatttttacatactaactttgccttttccatgcttgcttgatgcggcttgcagcactgaagaacagtttcaattgctagccaaccagagagcatgatcaaaccaaacaagttccctgtttcaggaaaaacaggttttaggtaactgaagggttaccagttactgattccacaatcttctctgtaaaanatttctgcctattatgcagactgggcggctttaaanntggtaaaactatnaaatacccatacaatattttaanggggccccnttatnaagcttttcaggccttcccctttccatagcattggtgggatacaagaaacctttaaacagcaacnagctatcnaggcccaaaaggaaagtaattntgattttttanagattccgnaacgaaaaaatggctgggttcaaatacnaccttctttttaaaatggnttccttattaaacnttttttttttttaattttaccccatggtcntgatnttngngcttccgcccanaaaatngn

SEQ ID NO: 769 - DNA, 877 bp, Homo sapiens
  misc_feature (1)...(877): n=A,T,C or G
aaagctggagctccccgcggtggcggccgctctagaactagtggatccactagtccanngngggggaattcgcggccgcgtcgacctctatacctttgntcatgcagcttcctctgactgggtttgttcttcacttggctaacccctcttttacttaagcacaccttgaacattccctccttccccatttccccgcagngcccctaatggacatacttctgaataacacaggtggtattccttccttgttggaacctcctggaggaagagacagatgattaacaaatccttccatcaacccctttgaccatgacatcaacagtgctccaaattatggggtaccgtattagcctatgtctatcttgatcagaatccttacctcggtgtattgaaattatctatttcgtgcctgcctctttaaagtcagggtttgccttatctattgtctaacaccatgcagtaggtaacatgcagtaggaaacatggcattaaattatttgggttcaaatcccagttatggtgtgtaaatgcctaccaggccgtgaggcacctgctaagcaggttgcacgcatcatttgaattcacaccacccttttgcaatagaacagataggcaacagaggctcatttgggctaaaggatttgatggaggggaagtgccaggattcccaccaaggcctcanggcccaggtccanggaccatgtctgttgtgacaactggagtgcatttcatatcccctnctctgnggggnaaggtccctcncgnggagaacnnttaaaacaatcatntctngggggnttaatgcttcttnccccagtgtggtncactgcngccacgagtcccanccactagtcccangtctgtcatgaaccanccc

SEQ ID NO: 770 - DNA, 874 bp, Homo sapiens
  misc_feature (1)...(874): n=A,T,C or G
ctggnctccccgcggtggcggccgctctagaactagtggatccactagtccagtgtggtggaattcgcggccgcgtcgaccttttcaaaggttaacttatttaattatcacannngcaacccgatgagtaggtaacagtattttactgataggtaatctaaagaaggaggctaaataaattgcccaatttcgaacagtgagaggaagaattaggattgaaacacatatagtggcttcagaatctgtaaccctcacgatgccactactacttctttcagaataccctttgcctatctattctgttcctatgtcatcaaattatacttactttaaaaagtatttgtctttattatttttaaaaaaacacagggaagtatttctgatcaggggcagtattggttctgaaagacaagccagtgtttttgagggtttctcccttgccagtttttctatgctgggttattcaagtcctaagaattgtgtagctattacagaaccgctttagcaaatgtgttccattaatcaaggtgatttataacaaaatttcatccaagtttggagtgctctgaaaacatagccaaaatgttcgcagggtctacccctctcgtgtgtcccttttttttagctatttcagaagcacactggtgcaatattttacgaaatgagtttcttccccttacctctgcatcctctaagaaaaaatcattgntgttttatgaanatgaanatcctgctatttcatatcttgattggagctgcttaattaaatgaccattttnaaatttgttttgattccnngcaaaaaaagtttnttnttggatgtagggggctcnnaaagnccaaaaccccccaaaatttttnnttgggaacccna

SEQ ID NO: 771 - DNA, 156 bp, Homo sapiens
  misc_feature (1)...(156): n=A,T,C or G
ttaaaaanctggnctccccgcggtggcggccgctctagaactagtggatccactagtccagtgtggtggaattcgcggccgcgtcgaccgcgagcggtcgcccttttttttttttttttnngtttttttgaanaattcattgggtatttattattc

SEQ ID NO: 772 - DNA, 586 bp, Homo sapiens
  misc_feature (1)...(586): n=A,T,C or G
ncaanctggnctccaccgcggtggcggccgctctagactagtggatccactagtccagtgtggtggaattcgcggccgcgtcgatcacaaagtgctcacaagtccngnatttattttatctccagatatgaaacttacccccagctatggtcttctatttgttatttaatttctaggccaattttttccacttgaatgtcagtattttaattcaaagtcaccttgtccaaataccaagtcatcaacttaccctcaaattatatcctcattcagaaaatctacatctattaatggtagctattttatccctgccccctgctttttctttttatatttaattaatttgntcatccagcaaatgcttattgagcaggtattgtaggctaaacaattctanactttaaggggacacagnttgcaaaacaaaatcctgccttgnatggatacttatgnnatggngggatacagacaatcaacataatgangngcatcatatataatggttagnanaatgataagggnttttgggaaaaaaatgcacccanccaananggattgggaagtgganggganggtcangggangg

SEQ ID NO: 773 - DNA, 2983 bp, Homo sapiens
agagatagagtcttccctggcattgcaggagagaatctgaagggatgatggatgcatcaaaagagctgcaagttctccacattgacttcttgaatcaggacaacgccgtttctcaccacacatgggagttccaaacgagcagtcctgtgttccggcgaggacaggtgtttcacctgcggctggtgctgaaccagcccctacaatcctaccaccaactgaaactggaattcagcacagggccgaatcctagcatcgccaaacacaccctggtggtgctcgacccgaggacgccctcagaccactacaactggcaggcaacccttcaaaatgagtctggcaaagaggtcacagtggctgtcaccagttcccccaatgccatcctgggcaagtaccaactaaacgtgaaaactggaaaccacatccttaagtctgaagaaaacatcctataccttctcttcaacccatggtgtaaagaggacatggttttcatgcctgatgaggacgagcgcaaagagtacatcctcaatgacacgggctgccattacgtgggggctgccagaagtatcaaatgcaaaccctggaactttggtcagtttgagaaaaatgtcctggactgctgcatttccctgctgactgagagctccctcaagcccacagataggagggaccccgtgctggtgtgcagggccatgtgtgctatgatgagctttgagaaaggccagggcgtgctcattgggaattggactggggactatgaaggtggcacagccccatacaagtggacaggcagtgccccgatcctgcagcagtactacaacacgaagcaggctgtgtgctttggccagtgctgggtgtttgctgggatcctgactacagtgctgagagcgttgggcatcccagcacgcagtgtgacaggcttcgattcagctcacgacacagaaaggaacctcacggtggacacctatgtgaatgagaatggcaagaaaatcaccagtatgacccacgactctgtctggaatttccatgtgtggacggatgcctggatgaagcgaccggatctgcccaagggctacgacggctggcaggctgtggacgcaacgccgcaggagcgaagccagggtgtcttctgctgtgggccatcaccactgaccgccatccgcaaaggtgacatctttattgtctatgacaccagattcgtcttctcagaagtgaatggtgacaggctcatctggttggtgaagatggtgaatgggcaggaggagttacacgtaatttcaatggagaccacaagcatcgggaaaaacatcagcaccaaggcagtgggccaagacaggcggagagatatcacctatgagtacaagtatccagaaggctcctctgaggagaggcaggtcatggatcatgccttcctccttctcagttctgagagggagcacagacgacctgtaaaagagaactttcttcacatgtcggtacaatcagatgatgtgctgctgggaaactctgttaatttcaccgtgattcttaaaaggaagaccgctgccctacagaatgtcaacatcttgggctcctttgaactacagttgtacactggcaagaagatggcaaaactgtgtgacctcaataagacctcgcagatccaaggtcaagtatcagaagtgactctgaccttggactccaagacctacatcaacagcctggctatattagatgatgagccagttatcagaggtttcatcattgcggaaattgtggagtctaaggaaatcatggcctctgaagtattcacgtctttccagtaccctgagttctctatagagttgcctaacacaggcagaattggccagctacttgtctgcaattgtatcttcaagaataccctggccatccctttgactgacgtcaagttctctttggaaagcctgggcatctcctcactacagacctctgaccatgggacggtgcagcctggtgagaccatccaatcccaaataaaatgcaccccaataaaaactggacccaagaaatttatcgtcaagttaagttccaaacaagtgaaagagattaatgctcagaagattgttctcatcaccaagtagccttgtctgatgctgtggagccttagttgagatttcagcatttcctaccttgtgcttagctttcagattatggatgattaaatttgatgacttatatgagggcagattcaagagccagcaggtcaaaaaggccaacacaaccataagcagccagacccacaaggccaggtcctgtgctatcacagggtcacctcttttacagttagaaacaccagccgaggccacagaatcccatccctttcctgagtcatggcctcaaaaatcagggccaccattgtctcaattcaaatccatagatttcgaagccacagagtctctccctggagcagcagactatgggcagcccagtgctgccacctgctgacgacccttgagaagctgccatatcttcaggccatgggttcaccagccctgaaggcacctgtcaactggagtgctctctcagcactgggatgggcctgatagaagtgcattctcctcctattgcctccattctcctctctctatccctgaaatccaggaagtccctctcctggtgctccaagcagtttgaagcccaatctgcaaggacatttctcaagggccatgtggttttgcagacaaccctgtcctcaggcctgaactcaccatagagacccatgtcagcaaacggtgaccagcaaatcctcttcccttattctaaagctgccccttgggagactccagggagaaggcattgcttcctccctggtgtgaactctttctttggtattccatccactatcctggcaactcaaggctgcttctgttaactgaagcctgctccttcttgttctgccctccagagatttgctcaaatgatcaataagctttaaattaaactctacttcaagaaaaaaaaaccg

SEQ ID NO: 774 - DNA, 3064 bp, Homo sapiens
aattctaaaaatgcttttgcaagcttgcatgcctgcaggtgcagcggccgccagtgtgatggatatctgcagaattcggcttgcgctcagctggaattccgcagagatagagtcttccctggcattgcaggagagaatctgaagggatgatggatgcatcaaaagagctgcaagttctccacattgacttcttgaatcaggacaacgccgtttctcaccacacatgggagttccaaacgagcagtcctgtgttccggcgaggacaggtgtttcacctgcggctggtgctgaaccagcccctacaatcctaccaccaactgaaactggaattcagcacagggccgaatcctagcatcgccaaacacaccctggtggtgctcgacccgaggacgccctcagaccactacaactggcaggcaacccttcaaaatgagtctggcaaagaggtcacagtggctgtcaccagttcccccaatgccatcctgggcaagtaccaactaaacgtgaaaactggaaaccacatccttaagtctgaagaaaacatcctataccttctcttcaacccatggtgtaaagaggacatggttttcatgcctgatgaggacgagcgcaaagagtacatcctcaatgacacgggctgccattacgtgggggctgccagaagtatcaaatgcaaaccctggaactttggtcagtttgagaaaaatgtcctggactgctgcatttccctgctgactgagagctccctcaagcccacagataggagggaccccgtgctggtgtgcagggccatgtgtgctatgatgagctttgagaaaggccagggcgtgctcattgggaattggactggggactacgaaggtggcacagccccatacaagtggacaggcagtgccccgatcctgcagcagtactacaacacgaagcaggctgtgtgctttggccagtgctgggtgtttgctgggatcctgactacagtgctgagagcgttgggcatcccagcacgcagtgtgacaggcttcgattcagctcacgacacagaaaggaacctcacggtggacacctatgtgaatgagaatggcgagaaaatcaccagtatgacccacgactctgtctggaatttccatgtgtggacggatgcctggatgaagcgaccctacgacggctggcaggctgtggacgcaacgccgcaggagcgaagccagggtgtcttctgctgtgggccatcaccactgaccgccatccgcaaaggtgacatctttattgtctatgacaccagattcgtcttctcagaagtgaatggtgacaggctcatctggttggtgaagatggtgaatgggcaggaggagttacacgtaatttcaatggagaccacaagcatcgggaaaaacatcagcaccaaggcagtgggccaagacaggcggagagatatcacctatgagtacaagtatccagaaggctcctctgaggagaggcaggtcatggatcatgccttcctccttctcagttctgagagggagcacagacagcctgtaaaagagaactttcttcacatgtcggtacaatcagatgatgtgctgctgggaaactctgttaatttcaccgtgattcttaaaaggaagaccgctgccctacagaatgtcaacatcttgggctcctttgaactacagttgtacactggcaagaagatggcaaaactgtgtgacctcaataagacctcgcagatccaaggtcaagtatcagaagtgactctgaccttggactccaagacctacatcaacagcctggctatattagatgatgagccagttatcagaggtttcatcattgcggaaattgtggagtctaaggaaatcatggcctctgaagtattcacgtcaaaccagtaccctgagttctctatagagttgcctaacacaggcagaattggccagctacttgtctgcaattgtatcttcaagaataccctggccatccctttgactgacgtcaagttctctttggaaagcctgggcatctcctcactacagacctctgaccatgggacggtgcagcctggtgagaccatccaatcccaaataaaatgcaccccaataaaaactggacccaagaaatttatcgtcaagttaagttccaaacaagtgaaagagattaatgctcagaagattgttctcatcaccaagtagccttgtctgatgctgtggagccttagttgagatttcagcatttcctaccttgtgcttagctttcagattatggatgattaaatttgatgacttatatgagggcagattcaagagccagcaggtcaaaaaggccaacacaaccataagcagccagacccacaaggccaggtcctgtgctatcacagggtcacctcttttacagttagaaacaccagccgaggccacagaatcccatccctttcctgagtcatggcctcaaaaatcagggccaccattgtctcaattcaaatccatagatttcgaagccacagagctcttccctggagcagcagactatgggcagcccagtgctgccacctgctgacgacccttgagaagctgccatatcttcaggccatgggttcaccagccctgaaggcacctgtcaactggagtgctctctcagcactgggatgggcctgatagaagtgcattctcctcctattgcctccattctcctctctctatccctgaaatccaggaagtccctctcctggtgctccaagcagtttgaagcccaatctgcaaggacatttctcaagggccatgtggttttgcagacaaccctgtcctcaggcctgaactcaccatagagacccatgtcagcaaacggtgaccagcaaatcctcttcccttattctaaagctgccccttgggagactccagggagaaggcattgcttcctccctggtgtgaactctttctttggtattccatccactatcctggcaactcaaggctgcttctgttaactgaagcctgctccttcttgttctgccctccagagatttgctcaaatgatcaataagctttaaattaaaccggaatccgcggaattc

SEQ ID NO: 775 - protein, 684 aa, Homo sapiens
MMDASKELQVLHIDFLNQDNAVSHHTWEFQTSSPVFRRGQVFHLRLVLNQPLQSYHQLKLEFSTGPNPSIAKHTLVVLDPRTPSDHYNWQATLQNESGKEVTVAVTSSPNAILGKYQLNVKTGNHILKSEENILYLLFNPWCKEDMVFMPDEDERKEYILNDTGCHYVGAARSIKCKPWNFGQFEKNVLDCCISLLTESSLKPTDRRDPVLVCRAMCAMMSFEKGQGVLIGNWTGDYEGGTAPYKWTGSAPILQQYYNTKQAVCFGQCWVFAGILTTVLRALGIPARSVTGFDSAHDTERNLTVDTYVNENGKKITSMTHDSVWNFHVWTDAWMKRPDLPKGYDGWQAVDATPQERSQGVFCCGPSPLTAIRKGDIFIVYDTRFVFSEVNGDRLIWLVKMVNGQEELHVISMETTSIGKNISTKAVGQDRRRDITYEYKYPEGSSEERQVMDHAFLLLSSEREHRRPVKENFLHMSVQSDDVLLGNSVNFTVILKRKTAALQNVNILGSFELQLYTGKKMAKLCDLNKTSQIQGQVSEVTLTLDSKTYINSLAILDDEPVIRGFIIAEIVESKEIMASEVFTSFQYPEFSIELPNTGRIGQLLVCNCIFKNTLAIPLTDVKFSLESLGISSLQTSDHGTVQPGETIQSQIKCTPIKTGPKKFIVKLSSKQVKEINAQKIVLITK

SEQ ID NO: 776 - protein, 679 aa, Homo sapiens
MMDASKELQVLHIDFLNQDNAVSHHTWEFQTSSPVFRRGQVFHLRLVLNQPLQSYHQLKLEFSTGPNPSIAKHTLVVLDPRTPSDHYNWQATLQNESGKEVTVAVTSSPNAILGKYQLNVKTGNHILKSEENILYLLFNPWCKEDMVFMPDEDERKEYILNDTGCHYVGAARSIKCKPWNFGQFEKNVLDCCISLLTESSLKPTDRRDPVLVCRAMCAMMSFEKGQGVLIGNWTGDYEGGTAPYKWTGSAPILQQYYNTKQAVCFGQCWVFAGILTTVLRALGIPARSVTGFDSAHDTERNLTVDTYVNENGEKITSMTHDSVWNFHVWTDAWMKRPYDGWQAVDATPQERSQGVFCCGPSPLTAIRKGDIFIVYDTRFVFSEVNGDRLIWLVKMVNGQEELHVISMETTSIGKNISTKAVGQDRRRDITYEYKYPEGSSEERQVMDHAFLLLSSEREHRQPVKENFLHMSVQSDDVLLGNSVNFTVILKRKTAALQNVNILGSFELQLYTGKKMAKLCDLNKTSQIQGQVSEVTLTLDSKTYINSLAILDDEPVIRGFIIAEIVESKEIMASEVFTSNQYPEFSIELPNTGRIGQLLVCNCIFKNTLAIPLTDVKFSLESLGISSLQTSDHGTVQPGETIQSQIKCTPIKTGPKKFIVKLSSKQVKEINAQKIVLITK

SEQ ID NO: 777 - DNA, 5668 bp, Homo sapiens
gtcacttaggaaaaggtgtcctttcgggcagccgggctcagcatgaggaacagaaggaatgacactctggacagcacccggaccctgtactccagcgcgtctcggagcacagacttgtcttacagtgaaagcgacttggtgaattttattcaagcaaattttaagaaacgagaatgtgtcttctttaccaaagattccaaggccacggagaatgtgtgcaagtgtggctatgcccagagccagcacatggaaggcacccagatcaaccaaagtgagaaatggaactacaagaaacacaccaaggaatttcctaccgacgcctttggggatattcagtttgagacactggggaagaaagggaagtatatacgtctgtcctgcgacacggacgcggaaatcctttacgagctgctgacccagcactggcacctgaaaacacccaacctggtcatttctgtgaccgggggcgccaagaacttcgccctgaagccgcgcatgcgcaagatcttcagccggctcatctacatcgcgcagtccaaaggtgcttggattctcacgggaggcacccattatggcctgacgaagtacatcggggaggtggtgagagataacaccatcagcaggagttcagaggagaatattgtggccattggcatagcagcttggggcatggtctccaaccgggacaccctcatcaggaattgcgatgctgagggctattttttagcccagtaccttatggatgacttcacaagggatccactgtatatcctggacaacaaccacacacatttgctgctcgtggacaatggctgtcatggacatcccactgtcgaagcaaagctccggaatcagctagagaagcatatctctgagcgcactattcaagattccaactatggtggcaagatccccattgtgtgttttgcccaaggaggtggaaaagagactttgaaagccatcaatacctccatcaaaaataaaattccttgtgtggtggtggaaggctcgggccggatcgctgatgtgatcgctagcctggtggaggtggaggatgccccgacatcttctgccgtcaaggagaagctggtgcgctttttaccccgcacggtgtcccggctgtctgaggaggagactgagagttggatcaaatggctcaaagaaattctcgaatgttctcacctattaacagttattaaaatggaagaagctggggatgaaattgtgagcaatgccatctcctacgctctatacaaagccttcagcaccagtgagcaagacaaggataactggaatgggcagctgaagcttctgctggagtggaaccagctggacttagccaatgatgagattttcaccaatgaccgccgatgggagtctgctgaccttcaagaagtcatgtttacggctctcataaaggacagacccaagtttgtccgcctctttctggagaatggcttgaacctacggaagtttctcacccatgatgtcctcactgaactcttctccaaccacttcagcacgcttgtgtaccggaatctgcagatcgccaagaattcctataatgatgccctcctcacgtttgtctggaaactggttgcgaacttccgaagaggcttccggaaggaagacagaaatggccgggacgagatggacatagaactccacgacgtgtctcctattactcggcaccccctgcaagctctcttcatctgggccattcttcagaataagaaggaactctccaaagtcatttgggagcagaccaggggctgcactctggcagccctgggagccagcaagcttctgaagactctggccaaagtgaagaacgacatcaatgctgctggggagtccgaggagctggctaatgagtacgagacccgggctgttgagctgttcactgagtgttacagcagcgatgaagacttggcagaacagctgctggtctattcctgtgaagcttggggtggaagcaactgtctggagctggcggtggaggccacagaccagcatttcaccgcccagcctggggtccagaattttctttctaagcaatggtatggagagatttcccgagacaccaagaactggaagattatcctgtgtctgtttattatacccttggtgggctgtggctttgtatcatttaggaagaaacctgtcgacaagcacaagaagctgctttggtactatgtggcgttcttcacctcccccttcgtggtcttctcctggaatgtggtcttctacatcgccttcctcctgctgtttgcctacgtgctgctcatggatttccattcggtgccacacccccccgagctggtcctgtactcgctggtctttgtcctcttctgtgatgaagtgagacagtggtacgtaaatggggtgaattattttactgacctgtggaatgtgatggacacgctggggcttttttacttcatagcaggaattgtatttcggctccactcttctaataaaagctctttgtattctggacgagtcattttctgtctggactacattattttcactctaagattgatccacatttttactgtaagcagaaacttaggacccaagattataatgctgcagaggatgctgatcgatgtgttcttcttcctgttcctctttgcggtgtggatggtggcctttggcgtggccaggcaagggatccttaggcagaatgagcagcgctggaggtggatattccgttcggtcatctacgagccctacctggccatgttcggccaggtgcccagtgacgtggatggtaccacgtatgactttgcccactgcaccttcactgggaatgagtccaagccactgtgtgtggagctggatgagcacaacctgccccggttccccgagtggatcaccatccccctggtgtgcatctacatgttatccaccaacatcctgctggtcaacctgctggtcgccatgtttggctacacggtgggcaccgtccaggagaacaatgaccaggtctggaagttccagaggtacttcctggtgcaggagtactgcagccgcctcaatatccccttccccttcatcgtcttcgcttacttctacatggtggtgaagaagtgcttcaagtgttgctgcaaggagaaaaacatggagtcttctgtctgctgtttcaaaaatgaagacaatgagactctggcatgggagggtgtcatgaaggaaaactaccttgtcaagatcaacacaaaagccaacgacacctcagaggaaatgaggcatcgatttagacaactggatacaaagcttaatgatctcaagggtcttctgaaagagattgctaataaaatcaaataaaactgtatgaaactctaatggagaaaaatctaattatagcaagatcatattaaggaatgctgatgaacaattttgctatcgactactaaatgagagattttcagacccctgggtacatggtggatgattttaaatcaccctagtgtgctgagaccttgagaataaagtgtgtgattggtttcatacttgaagacggatataaaggaagaatatttcctttatgtgtttctccagaatggtgcctgtttctctctgtgtctcaatgcctgggactggaggttgatagtttaagtgtgttcttaccgcctcctttttcctttaatcttatttttgatgaacacatatataggagaacatctatcctatgaataagaacctggtcatgctttactcctgtattgttattttgttcatttccaattgattctctacttttcccttttttgtattatgtgactaattagttggcatattgttaaaagtctctcaaattaggccagattctaaaacatgctgcagcaagaggaccccgctctcttcaggaaaagtgttttcatttctcaggatgcttcttacctgtcagaggaggtgacaaggcagtctcttgctctcttggactcaccaggctcctattgaaggaaccacccccattcctaaatatgtgaaaagtcgcccaaaatgcaaccttgaaaggcactactgactttgttcttattggatactcctcttatttattatttttccattaaaaataatagctggctattatagaaaatttagaccatacagagatgtagaaagaacataaattgtccccattaccttaaggtaatcactgctaacaatttctggatggtttttcaagtctattttttttctatgtatgtctcaattctctttcaaaattttacagaatgttatcatactacatatatactttttatgtaagctttttcacttagtattttatcaaatatgtttttattatattcatagccttcttaaacattatatcaataattgcataataggcaacctctagcgattaccataattttgctcattgaaggctatctccagttgatcattgggatgagcatctttgtgcatgaatcctattgctgtatttgggaaaattttccaaggttagattccaataaatatctatttattattaaatattaaaatatcgatttattattaaaaccatttataaggctttttcataaatgtatagcaaataggaattattaacttgagcataagatatgagatacatgaacctgaactattaaaataaaatattatatttaaccctagtttaagaagaagtcaatatgcttatttaaatattatggatggtgggcagatcacttgaggtcaggagttcgagaccagcctggccaacatggcaaaaccacatctctactaaaaataaaaaaattagctgggtgtggtggtgcactcctgtaatcccagctactcagaaggctgaggtacaagaattgctggaacctgggaggcggaggttgcagtgaaccaagattgcaccactgcactccagccggggtgacagagtgagactccgactgaaaataaataaataaataaataaataaataaataaataaatattatggatggtgaagggaatggtatagaattggagagattatcttactgaacacctgtagtcccagctttctctggaagtggtggtatttgagcaggatgtgcacaaggcaattgaaatgcccataattagtttctcagctttgaatacactataaactcagtggctgaaggaggaaattttagaaggaagctactaaaagatctaatttgaaaaactacaaaagcattaactaaaaaagtttattttccttttgtctgggcagtagtgaaaataactactcacaacattcactatgtttgcaaggaattaacacaaataaaagatgcctttttacttaaacgccaagacagaaaacttgcccaatactgagaagcaacttgcattagagagggaactgttaaatgttttcaacccagttcatctggtggatgtttttgcaggttactctgagaattttgcttatgaaaaatcattatttttagtgtagttcacaataatgtattgaacatacttctaatcaaaggtgctatgtccttgtgtatggtactaaatgtgtcctgtgtacttttgcacaactgagaatcctgcggcttggtttaatgagtgtgttcatgaaataaataatggaggaattgtcaaaaaaaaaaaaaaaaaaaaaaaaaaaaaaaaaaaaaaaaaaaaaaaaaaaaaaaaaaaaaaaaa

SEQ ID NO: 778 - protein, 1095 aa, Homo sapiens
MRNRRNDTLDSTRTLYSSASRSTDLSYSESDLVNFIQANFKKRECVFFTKDSKATENVCKCGYAQSQHMEGTQINQSEKWNYKKHTKEFPTDAFGDIQFETLGKKGKYIRLSCDTDAEILYELLTQHWHLKTPNLVISVTGGAKNFALKPRMRKIFSRLIYIAQSKGAWILTGGTHYGLTKYIGEVVRDNTISRSSEENIVAIGIAAWGMVSNRDTLIRNCDAEGYFLAQYLMDDFTRDPLYILDNNHTHLLLVDNGCHGHPTVEAKLRNQLEKHISERTIQDSNYGGKIPIVCFAQGGGKETLKAINTSIKNKIPCVVVEGSGRIADVIASLVEVEDAPTSSAVKEKLVRFLPRTVSRLSEEETESWIKWLKEILECSHLLTVIKMEEAGDEIVSNAISYALYKAFSTSEQDKDNWNGQLKLLLEWNQLDLANDEIFTNDRRWESADLQEVMFTALIKDRPKFVRLFLENGLNLRKFLTHDVLTELFSNHFSTLVYRNLQIAKNSYNDALLTFVWKLVANFRRGFRKEDRNGRDEMDIELHDVSPITRHPLQALFIWAILQNKKELSKVIWEQTRGCTLAALGASKLLKTLAKVKNDINAAGESEELANEYETRAVELFTECYSSDEDLAEQLLVYSCEAWGGSNCLELAVEATDQHFTAQPGVQNFLSKQWYGEISRDTKNWKIILCLFIIPLVGCGFVSFRKKPVDKHKKLLWYYVAFFTSPFVVFSWNVVFYIAFLLLFAYVLLMDFHSVPHPPELVLYSLVFVLFCDEVRQWYVNGVNYFTDLWNVMDTLGLFYFIAGIVFRLHSSNKSSLYSGRVIFCLDYIIFTLRLIHIFTVSRNLGPKIIMLQRMLIDVFFFLFLFAVWMVAFGVARQGILRQNEQRWRWIFRSVIYEPYLAMFGQVPSDVDGTTYDFAHCTFTGNESKPLCVELDEHNLPRFPEWITIPLVCIYMLSTNILLVNLLVAMFGYTVGTVQENNDQVWKFQRYFLVQEYCSRLNIPFPFIVFAYFYMVVKKCFKCCCKEKNMESSVCCFKNEDNETLAWEGVMKENYLVKINTKANDTSEEMRHRFRQLDTKLNDLKGLLKEIANKIK

SEQ ID NO: 779 - DNA, 3639 bp, Homo sapiens
gattacgcaagctatttaggtgacactatagaatwctcagcttgcatcaagcttggtaccgagctcggatccctagtaacggccgccagtgtgctggaattcgcccttgcagccgggctcagcatgaggaacagaaggaatgacactctggacagcacccggaccctgtactccagcgcgtctcggagcacagacttgtcttacagtgaaagcgacttggtgaattttattcaagcaaattttaagaaacgagaatgtgtcttctttaccaaagattccaaggccacggagaatgtgtgcaagtgtggctatgcccagagccagcacatggaaggcacccagatcaaccaaagtgagaaatggaactacaagaaacacaccaaggaatttcctaccgacgcctttggggatattcagtttgagacactggggaagaaagggaagtatatacgtctgtcctgcgacacggacgcggaaatcctttacgagctgctgacccagcactggcacctgaaaacacccaacctggtcatttctgtgaccgggggcgccaagaacttcgccctgaagccgcgcatgcgcaagatcttcagccggctcatctacatcgcgcagtccaaaggtgcttggattctcacgggaggcacccattatggcctgatgaagtacatcggggaggtggtgagagataacaccatcagcaggagttcagaggagaatattgtggccattggcatagcagcttggggcatggtctccaaccgggacaccctcatcaggaattgcgatgctgagggctattttttagcccagtaccttatggatgacttcacaagagatccactgtatatcctggacaacaaccacacacatttgctgctcgtggacaatggctgtcatggacatcccactgtcgaagcaaagctccggaatcagctagagaagtatatctctgagcgcactattcaagattccaactatggtggcaagatccccattgtgtgttttgcccaaggaggtggaaaagagactttgaaagccatcaatacctccatcaaaaataaaattccttgtgtggtggtggaaggctcgggccagatcgctgatgtgatcgctagcctggtggaggtggaggatgccctgacatcttctgccgtcaaggagaagctggtgcgctttttaccccgcacggtgtcccggctgcctgaggaggagactgagagttggatcaaatggctcaaagaaattctcgaatgttctcacctattaacagttattaaaatggaagaagctggggatgaaattgtgagcaatgccatctcctacgctctatacaaagccttcagcaccagtgagcaagacaaggataactggaatgggcagctgaagcttctgctggagtggaaccagctggacttagccaatgatgagattttcaccaatgaccgccgatgggagtctgctgaccttcaagaagtcatgtttacggctctcataaaggacagacccaagtttgtccgcctctttctggagaatggcttgaacctacggaagtttctcacccatgatgtcctcactgaactcttctccaaccacttcagcacgcttgtgtaccggaatctgcagatcgccaagaattcctataatgatgccctcctcacgtttgtctggaaactggttgcgaacttccgaagaggcttccggaaggaagacagaaatggccgggacgagatggacatagaactccacgacgtgtctcctattactcggcaccccctgcaagctctcttcatctgggccattcttcagaataagaaggaactctccaaagtcatttgggagcagaccaggggctgcactctggcagccctgggagccagcaagcttctgaagactctggccaaagtgaagaacgacatcaatgctgctggggagtccgaggagctggctaatgagtacgagacccgggctgttgagctgttcactgagtgttacagcagcgatgaagacttggcagaacagctgctggtctattcctgtgaagcttggggtggaagcaactgtctggagctggcggtggaggccacagaccagcatttcatcgcccagcctggggtccagaattttctttctaagcaatggtatggagagatttcccgagacaccaagaactggaagattatcctgtgtctgtttattatacccttggtgggctgtggctttgtatcatttaggaagaaacctgtcgacaagcacaagaagctgctttggtactatgtggcgttcttcacctcccccttcgtggtcttctcctggaatgtggtcttctacatcgccttcctcctgctgtttgcctacgtgctgctcatggatttccattcggtgccacacccccccgagctggtcctgtactcgctggtctttgtcctcttctgtgatgaagtgagacagtggtacgtaaatggggtgaattattttactgacctgtggaatgtgatggacacgctggggcttttttacttcatagcaggaattgtatttcggctccactcttctaataaaagctctttgtattctggacgagtcattttctgtctggactacattattttcactctaagattgatccacatttttactgtaagcagaaacttaggacccaagattataatgctgcagaggatgctgatcgatgtgttcttcttcctgttcctctttgcggwgtggatggtggcctttggcgtggccaggcaagggatccttaggcagaatgagcagcgctggaggtggatattccgttcggtcatctacgagccctacctggccatgttcggccaggtgcccagtgacgtggatggtaccacgtatgactttgcccactgcaccttcactgggaatgagtccaagccactgtgtgtggagctggatgagcacaacctgccccggttccccgagtggatcaccatccccctggtgtgcatctacatgttatccaccaacatcctgctggtcaacctgctggtcgccatgtttggctacacggtgggcaccgtccaggagaacaatgaccaggtctggaagttccagaggtacttcctggtgcaggagtactgcagccgcctcaatatccccttccccttcatcgtcttcgcttacttctacatggtggtgaagaagtgcttcaagtgttgctgcaaggagaaaaacatggagtcttctgtctgctgtttcaaaaatgaagacaatgagactctggcatgggagggtgtcatgaaggaaaactaccttgtcaagatcaacacaaaagccaacgacacctcagaggaaatgaggcatcgatttagacaactggatacaaagcttaatgatctcaagggtcttctgaaagagattgctaataaaatcaaataaaactgtatgaactctaatggagaaaaatctaattatagcaagatcatattaaggaatgctgatgaacaattttgctatcgactactaaatgagagattttcagacccctgggtacatggtggatgattttaaatcaccctagtgtgctgagaccttgagaataaagtgtgaagggcgaattctgcagatatccatcacactggcggccgctcgagcatgcatctagag

SEQ ID NO: 780 - protein, 1095 aa, Homo sapiens
  VARIANT (1)...(1095): Xaa = Any Amino Acid
MRNRRNDTLDSTRTLYSSASRSTDLSYSESDLVNFIQANFKKRECVFFTKDSKATENVCKCGYAQSQHMEGTQINQSEKWNYKKHTKEFPTDAFGDIQFETLGKKGKYIRLSCDTDAEILYELLTQHWHLKTPNLVISVTGGAKNFALKPRMRKIFSRLIYIAQSKGAWILTGGTHYGLMKYIGEVVRDNTISRSSEENIVAIGIAAWGMVSNRDTLIRNCDAEGYFLAQYLMDDFTRDPLYILDNNHTHLLLVDNGCHGHPTVEAKLRNQLEKYISERTIQDSNYGGKIPIVCFAQGGGKETLKAINTSIKNKIPCVVVEGSGQIADVIASLVEVEDALTSSAVKEKLVRFLPRTVSRLPEEETESWIKWLKEILECSHLLTVIKMEEAGDEIVSNAISYALYKAFSTSEQDKDNWNGQLKLLLEWNQLDLANDEIFTNDRRWESADLQEVMFTALIKDRPKFVRLFLENGLNLRKFLTHDVLTELFSNHFSTLVYRNLQIAKNSYNDALLTFVWKLVANFRRGFRKEDRNGRDEMDIELHDVSPITRHPLQALFIWAILQNKKELSKVIWEQTRGCTLAALGASKLLKTLAKVKNDINAAGESEELANEYETRAVELFTECYSSDEDLAEQLLVYSCEAWGGSNCLELAVEATDQHFIAQPGVQNFLSKQWYGEISRDTKNWKIILCLFIIPLVGCGFVSFRKKPVDKHKKLLWYYVAFFTSPFVVFSWNVVFYIAFLLLFAYVLLMDFHSVPHPPELVLYSLVFVLFCDEVRQWYVNGVNYFTDLWNVMDTLGLFYFIAGIVFRLHSSNKSSLYSGRVIFCLDYIIFTLRLIHIFTVSRNLGPKIIMLQRMLIDVFFFLFLFAXWMVAFGVARQGILRQNEQRWRWIFRSVIYEPYLAMFGQVPSDVDGTTYDFAHCTFTGNESKPLCVELDEHNLPRFPEWITIPLVCIYMLSTNILLVNLLVAMFGYTVGTVQENNDQVWKFQRYFLVQEYCSRLNIPFPFIVFAYFYMVVKKCFKCCCKEKNMESSVCCFKNEDNETLAWEGVMKENYLVKINTKANDTSEEMRHRFRQLDTKLNDLKGLLKEIANKIK

SEQ ID NO: 781 - protein, 15 aa, Homo sapiens
RMPTVLQCVNVSVVS

SEQ ID NO: 782 - DNA, 45 bp, Homo sapiens
agaatgcctaccgtgctgcagtgcgtgaacgtgtcggtggtgtct

SEQ ID NO: 783 - DNA, 45 bp, Homo sapiens
gagccagggagccagatggtggaggccagcctctccgtacggcac

SEQ ID NO: 784 - DNA, 45 bp, Homo sapiens
gaggccgaccaagagccagggagccagatggtggaggccagcctc

SEQ ID NO: 785 - DNA, 45 bp, Homo sapiens
ggcctgcacagtcttgaggccgaccaagagccagggagccagatg

SEQ ID NO: 786 - DNA, 45 bp, Homo sapiens
tacaccatcgggctgggcctgcacagtcttgaggccgaccaagag

SEQ ID NO: 787 - DNA, 42 bp, Homo sapiens
ttccagaactcctacaccatcgggctgggcctgcacagtctt

SEQ ID NO: 788 - DNA, 45 bp, Homo sapiens
ctgtcagccgcacactgtttccagaactcctacaccatcgggctg

SEQ ID NO: 789 - DNA, 45 bp, Homo sapiens
catccgcagtgggtgctgtcagccgcacactgtttccagaactcc

SEQ ID NO: 790 - DNA, 45 bp, Homo sapiens
tcgggcgtcctggtgcatccgcagtgggtgctgtcagccgcacac

SEQ ID NO: 791 - DNA, 45 bp, Homo sapiens
aacgaattgttctgctcgggcgtcctggtgcatccgcagtgggtg

SEQ ID NO: 792 - DNA, 45 bp, Homo sapiens
gcactggtcatggaaaacgaattgttctgctcgggcgtcctggtg

SEQ ID NO: 793 - DNA, 51 bp, Homo sapiens
tcgcagccctggcaggcggcactggtcatggaaaacgaattgttctgctcg

SEQ ID NO: 794 - DNA, 45 bp, Homo sapiens
atcagcattgcttcgcagtgccctaccgcggggaactcttgcctc

SEQ ID NO: 795 - DNA, 45 bp, Homo sapiens
tccgtgtccgagtctgacaccatccggagcatcagcattgcttcg

SEQ ID NO: 796 - DNA, 45 bp, Homo sapiens
atcaagttggacgaatccgtgtccgagtctgacaccatccggagc

SEQ ID NO: 797 - DNA, 45 bp, Homo sapiens
aacgacctcatgctcatcaagttggacgaatccgtgtccgagtct

SEQ ID NO: 798 - DNA, 45 bp, Homo sapiens
agacccttgctcgctaacgacctcatgctcatcaagttggacgaa

SEQ ID NO: 799 - protein, 15 aa, Homo sapiens
EPGSQMVEASLSVRH

SEQ ID NO: 800 - protein, 15 aa, Homo sapiens
EADQEPGSQMVEASL

SEQ ID NO: 801 - protein, 15 aa, Homo sapiens
GLHSLEADQEPGSQM

SEQ ID NO: 802 - protein, 15 aa, Homo sapiens
YTIGLGLHSLEADQE

SEQ ID NO: 803 - protein, 14 aa, Homo sapiens
FQNSYTIGLGLHSL

SEQ ID NO: 804 - protein, 15 aa, Homo sapiens
LSAAHCFQNSYTIGL

SEQ ID NO: 805 - protein, 15 aa, Homo sapiens
HPQWVLSAAHCFQNS

SEQ ID NO: 806 - protein, 15 aa, Homo sapiens
SGVLVHPQWVLSAAH

SEQ ID NO: 807 - protein, 15 aa, Homo sapiens
NELFCSGVLVHPQWV

SEQ ID NO: 808 - protein, 15 aa, Homo sapiens
ALVMENELFCSGVLV

SEQ ID NO: 809 - protein, 17 aa, Homo sapiens
SQPWQAALVMENELFCS

SEQ ID NO: 810 - protein, 15 aa, Homo sapiens
ISIASQCPTAGNSCL

SEQ ID NO: 811 - protein, 15 aa, Homo sapiens
SVSESDTIRSISIAS

SEQ ID NO: 812 - protein, 15 aa, Homo sapiens
IKLDESVSESDTIRS

SEQ ID NO: 813 - protein, 15 aa, Homo sapiens
NDLMLIKLDESVSES

SEQ ID NO: 814 - protein, 15 aa, Homo sapiens
RPLLANDLMLIKLDE

SEQ ID NO: 815 - DNA, 35 bp, Artificial Sequence
  PCR primer
ggaccagcatatgaggaacagaaggaatgacactc

SEQ ID NO: 816 - DNA, 29 bp, Artificial Sequence
  PCR primer
ccgctcgagtccaccccaagcttcacagg

SEQ ID NO: 817 - DNA, 1959 bp, Homo sapiens
atgaggaacagaaggaatgacactctggacagcacccggaccctgtactccagcgcgtctcggagcacagacttgtcttacagtgaaagcgacttggtgaattttattcaagcaaattttaagaaacgagaatgtgtcttctttaccaaagattccaaggccacggagaatgtgtgcaagtgtggctatgcccagagccagcacatggaaggcacccagatcaaccaaagtgagaaatggaactacaagaaacacaccaaggaatttcctaccgacgcctttggggatattcagtttgagacactggggaagaaagggaagtatatacgtctgtcctgcgacacggacgcggaaatcctttacgagctgctgacccagcactggcacctgaaaacacccaacctggtcatttctgtgaccgggggcgccaagaacttcgccctgaagccgcgcatgcgcaagatcttcagccggctcatctacatcgcgcagtccaaaggtgcttggattctcacgggaggcacccattatggcctgatgaagtacatcggggaggtggtgagagataacaccatcagcaggagttcagaggagaatattgtggccattggcatagcagcttggggcatggtctccaaccgggacaccctcatcaggaattgcgatgctgagggctattttttagcccagtaccttatggatgacttcacaagagatccactgtatatcctggacaacaaccacacacatttgctgctcgtggacaatggctgtcatggacatcccactgtcgaagcaaagctccggaatcagctagagaagtatatctctgagcgcactattcaagattccaactatggtggcaagatccccattgtgtgttttgcccaaggaggtggaaaagagactttgaaagccatcaatacctccatcaaaaataaaattccttgtgtggtggtggaaggctcgggccagatcgctgatgtgatcgctagcctggtggaggtggaggatgccctgacatcttctgccgtcaaggagaagctggtgcgctttttaccccgcacggtgtcccggctgcctgaggaggagactgagagttggatcaaatggctcaaagaaattctcgaatgttctcacctattaacagttattaaaatggaagaagctggggatgaaattgtgagcaatgccatctcctacgctctatacaaagccttcagcaccagtgagcaagacaaggataactggaatgggcagctgaagcttctgctggagtggaaccagctggacttagccaatgatgagattttcaccaatgaccgccgatgggagtctgctgaccttcaagaagtcatgtttacggctctcataaaggacagacccaagtttgtccgcctctttctggagaatggcttgaacctacggaagtttctcacccatgatgtcctcactgaactcttctccaaccacttcagcacgcttgtgtaccggaatctgcagatcgccaagaattcctataatgatgccctcctcacgtttgtctggaaactggttgcgaacttccgaagaggcttccggaaggaagacagaaatggccgggacgagatggacatagaactccacgacgtgtctcctattactcggcaccccctgcaagctctcttcatctgggccattcttcagaataagaaggaactctccaaagtcatttgggagcagaccaggggctgcactctggcagccctgggagccagcaagcttctgaagactctggccaaagtgaagaacgacatcaatgctgctggggagtccgaggagctggctaatgagtacgagacccgggctgttgagctgttcactgagtgttacagcagcgatgaagacttggcagaacagctgctggtctattcctgtgaagcttggggtggactcgagcaccaccaccaccaccactga

SEQ ID NO: 818 - protein, 652 aa, Homo sapiens
MRNRRNDTLDSTRTLYSSASRSTDLSYSESDLVNFIQANFKKRECVFFTKDSKATENVCKCGYAQSQHMEGTQINQSEKWNYKKHTKEFPTDAFGDIQFETLGKKGKYIRLSCDTDAEILYELLTQHWHLKTPNLVISVTGGAKNFALKPRMRKIFSRLIYIAQSKGAWILTGGTHYGLMKYIGEVVRDNTISRSSEENIVAIGIAAWGMVSNRDTLIRNCDAEGYFLAQYLMDDFTRDPLYILDNNHTHLLLVDNGCHGHPTVEAKLRNQLEKYISERTIQDSNYGGKIPIVCFAQGGGKETLKAINTSIKNKIPCVVVEGSGQIADVIASLVEVEDALTSSAVKEKLVRFLPRTVSRLPEEETESWIKWLKEILECSHLLTVIKMEEAGDEIVSNAISYALYKAFSTSEQDKDNWNGQLKLLLEWNQLDLANDEIFTNDRRWESADLQEVMFTALIKDRPKFVRLFLENGLNLRKFLTHDVLTELFSNHFSTLVYRNLQIAKNSYNDALLTFVWKLVANFRRGFRKEDRNGRDEMDIELHDVSPITRHPLQALFIWAILQNKKELSKVIWEQTRGCTLAALGASKLLKTLAKVKNDINAAGESEELANEYETRAVELFTECYSSDEDLAEQLLVYSCEAWGGLEHHHHHH

SEQ ID NO: 819 - protein, 132 aa, Homo sapien
TAASDNFQLSQGGQGFAIPIGQAMAIAGQIRSGGGSPTVHIGPTAFLGLGVVDNNGNGARVQRVVGSAPAASLGISTGDVITAVDGAPINSATAMADALNGHHPGDVISVNWQTKSGGTRTGNVTLAEGPPA

SEQ ID NO: 820 - DNA, 36 bp, Artificial Sequence
  PCR primer
ggggaattcatgatccgggagaaatttgcccactgc

SEQ ID NO: 821 - DNA, 33 bp, Artificial Sequence
  PCR primer
gggctcgagtcaggagtttgagaccagcctggc

SEQ ID NO: 822 - DNA, 675 bp, Homo sapiens
atgcatcaccatcaccatcacacggccgcgtccgataacttccagctgtcccagggtgggcagggattcgccattccgatcgggcaggcgatggcgatcgcgggccagatcaagcttcccaccgttcatatcgggcctaccgccttcctcggcttgggtgttgtcgacaacaacggcaacggcgcacgagtccaacgcgtggtcgggagcgctccggcggcaagtctcggcatctccaccggcgacgtgatcaccgcggtcgacggcgctccgatcaactcggccaccgcgatggcggacgcgcttaacgggcatcatcccggtgacgtcatctcggtgacctggcaaaccaagtcgggcggcacgcgtacagggaacgtgacattggccgagggacccccggccgaattcatgatccgggagaaatttgcccactgcaccgtgctaaccattgcacacagattgaacaccattattgacagcgacaagataatggttttagattcaggaagactgaaagaatatgatgagccgtatgttttgctgcaaaataaagagagcctattttacaagatggtgcaacaactgggcaaggcagaagccgctgccctcactgaaacagcaaaacagagatggggtttcaccatgttggccaggctggtctcaaactcctga

SEQ ID NO: 823 - DNA, 291 bp, Homo sapiens
atggggatccgggagaaatttgcccactgcaccgtgctaaccattgcacacagattgaacaccattattgacagcgacaagataatggttttagattcaggaagactgaaagaatatgatgagccgtatgttttgctgcaaaataaagagagcctattttacaagatggtgcaacaactgggcaaggcagaagccgctgccctcactgaaacagcaaaacagagatggggtttcaccatgttggccaggctggtctcaaactccctcgagcaccaccaccaccaccactga

SEQ ID NO: 824 - DNA, 1074 bp, Homo sapiens
atgtcagccattgagagggtgtcagaggcaatcgtcagcatccgaagaatccagacctttttgctacttgatgagatatcacagcgcaaccgtcagctgccgtcagatggtaaaaagatggtgcatgtgcaggattttactgctttttgggataaggcatcagagaccccaactctacaaggcctttcctttactgtcagacctggcgaattgttagctgtggtcggccccgtgggagcagggaagtcatcactgttaagtgccgtgctcggggaattggccccaagtcacgggctggtcagcgtgcatggaagaattgcctatgtgtctcagcagccctgggtgttctcgggaactctgaggagtaatattttatttgggaagaaatacgaaaaggaacgatatgaaaaagtcataaaggcttgtgctctgaaaaaggatttacagctgttggaggatggtgatctgactgtgataggagatcggggaaccacgctgagtggagggcagaaagcacgggtaaaccttgcaagagcagtgtatcaagatgctgacatctatctcctggacgatcctctcagtgcagtagatgcggaagttagcagacacttgttcgaactgtgtatttgtcaaattttgcatgagaagatcacaattttagtgactcatcagttgcagtacctcaaagctgcaagtcagattctgatattgaaagatggtaaaatggtgcagaaggggacttacactgagttcctaaaatctggtatagattttggctcccttttaaagaaggataatgaggaaagtgaacaacctccagttccaggaactcccacactaaggaatcgtaccttctcagagtcttcggtttggtctcaacaatcttctagaccctccttgaaagatggtgctctggagagccaagatacagagaatgtcccagttacactatcagaggagaaccgttctgaaggaaaagttggttttcaggcctataagaattacttcagagctggtgctcactggattgtcttcattttccttattctcgagcaccaccaccaccaccactga

SEQ ID NO: 825 - protein, 224 aa, Homo sapiens
MHHHHHHTAASDNFQLSQGGQGFAIPIGQAMAIAGQIKLPTVHIGPTAFLGLGVVDNNGNGARVQRVVGSAPAASLGISTGDVITAVDGAPINSATAMADALNGHHPGDVISVTWQTKSGGTRTGNVTLAEGPPAEFMIREKFAHCTVLTIAHRLNTIIDSDKIMVLDSGRLKEYDEPYVLLQNKESLFYKMVQQLGKAEAAALTETAKQRWGFTMLARLVSNS

SEQ ID NO: 826 - protein, 357 aa, Homo sapiens
MSAIERVSEAIVSIRRIQTFLLLDEISQRNRQLPSDGKKMVHVQDFTAFWDKASETPTLQGLSFTVRPGELLAVVGPVGAGKSSLLSAVLGELAPSHGLVSVHGRIAYVSQQPWVFSGTLRSNILFGKKYEKERYEKVIKACALKKDLQLLEDGDLTVIGDRGTTLSGGQKARVNLARAVYQDADIYLLDDPLSAVDAEVSRHLFELCICQILHEKITILVTHQLQYLKAASQILILKDGKMVQKGTYTEFLKSGIDFGSLLKKDNEESEQPPVPGTPTLRNRTFSESSVWSQQSSRPSLKDGALESQDTENVPVTLSEENRSEGKVGFQAYKNYFRAGAHWIVFIFLILEHHHHHH

SEQ ID NO: 827 - protein, 96 aa, Homo sapiens
MGIREKFAHCTVLTIAHRLNTIIDSDKIMVLDSGRLKEYDEPYVLLQNKESLFYKMVQQLGKAEAAALTETAKQRWGFTMLARLVSNSLEHHHHHH

SEQ ID NO: 828 - DNA, 35 bp, Artificial Sequence
  PCR primer
cgcccatggggatccgggagaaatttgcccactgc

SEQ ID NO: 829 - DNA, 35 bp, Artificial Sequence
  PCR primer
cgcctcgagggagtttgagaccagcctggccaaca

SEQ ID NO: 830 - DNA, 38 bp, Artificial Sequence
  PCR primer
gcatggaccatatgtcagccattgagagggtgtcagag

SEQ ID NO: 831 - DNA, 34 bp, Artificial Sequence
  PCR primer
ccgctcgagaataaggaaaatgaagacaatccag

SEQ ID NO: 832 - DNA, 27 bp, Artificial Sequence
  PCR primer
gttgaattcatgcacgggccccaggtg

SEQ ID NO: 833 - DNA, 30 bp, Artificial Sequence
  PCR primer
cccctcgagtcactatggtctgcctcttga

SEQ ID NO: 834 - DNA, 915 bp, Homo sapiens
atgcatcaccatcaccatcacacggccgcgtccgataacttccagctgtcccagggtgggcagggattcgccattccgatcgggcaggcgatggcgatcgcgggccagatcaagcttcccaccgttcatatcgggcctaccgccttcctcggcttgggtgttgtcgacaacaacggcaacggcgcacgagtccaacgcgtggtcgggagcgctccggcggcaagtctcggcatctccaccggcgacgtgatcaccgcggtcgacggcgctccgatcaactcggccaccgcgatggcggacgcgcttaacgggcatcatcccggtgacgtcatctcggtgacctggcaaaccaagtcgggcggcacgcgtacagggaacgtgacattggccgagggacccccggccgaattcatgcacgggccccaggtgctggcacgctgctccgagtgtgcttgtcctgccttggctgccacctctgcgggggtgcgtctggagggggtggaccggccaccaaccttacccagtcaaggaagtggatggccatgttcccacagcctgagtggctgccacctgatggctgatggagcaaaggccttaggaaaagcagatggcccttggccctacctttttgttagaagaactgatgttccatgtcctgcagcgagtgaggttggtggctgtgcccccagctcctggcgcgccctcgcagaggtgactggttgctctttgggccctcttggccttgcccagcatgcacaagcctcagtgctactactgtgctacaaatggagccatataggggaaacgagcagccatctcaggagcaaggtgtatgctgcctttgggggctccagtccttgcctcaagggtcttatgtcactgtgggcttcttggttgtcaagaggcagaccatag

SEQ ID NO: 835 - protein, 304 aa, Homo sapiens [sequence omitted]

SEQ ID NO: 836 - DNA, 24 bp, Artificial Sequence
  PCR primer
cgaagtcacgtggaggccagcctc

SEQ ID NO: 837 - DNA, 29 bp, Artificial Sequence
  PCR primer
cctgaccgaattcattaactggcctggac

SEQ ID NO: 838 - protein, 166 aa, Homo sapiens
  VARIANT (1)...(166): Xaa = Any Amino Acid
MGHHHHHHVEASLSVRHPEYNRPLLANDLMLIKLDESVSESDTIRSISIASQCPTAGNSCLVSGWGLLANGRMPTVLQCVNVSVVSEEVCSKLYDPLYHPSMFCAGGGQXQXDSCNGDSGGPLICNGYLQGLVSFGKAPCGQVGVPGVYTNLCKFTEWIEKTVQAS

SEQ ID NO: 839 - DNA, 504 bp, Homo sapiens
  misc_feature (1)...(504): n = A,T,C or G
atgggccatcatcatcatcatcacgtggaggccagcctctccgtacggcacccagagtacaacagacccttgctcgctaacgacctcatgctcatcaagttggacgaatccgtgtccgagtctgacaccatccggagcatcagcattgcttcgcagtgccctaccgcggggaactcttgcctcgtttctggctggggtctgctggcgaacggcagaatgcctaccgtgctgcagtgcgtgaacgtgtcggtggtgtctgaggaggtctgcagtaagctctatgacccgctgtaccaccccagcatgttctgcgccggcggagggcaanaccagaangactcctgcaacggtgactctggggggcccctgatctgcaacgggtacttgcagggccttgtgtctttcggaaaagccccgtgtggccaagttggcgtgccaggtgtctacaccaacctctgcaaattcactgagtggatagagaaaaccgtccaggccagttaatga

SEQ ID NO: 840 - DNA, 21 bp, Artificial Sequence
  PCR primer
ctcagggttccggagccgcgg

SEQ ID NO: 841 - DNA, 35 bp, Artificial Sequence
  PCR primer
ctatagaattcattaccaaaaagctgggctccagc

SEQ ID NO: 842 - protein, 241 aa, Homo sapiens
MQHHHHHHLRVPEPRPGEAKAEGAAPPTPSKPLTSFLIQDILRDGAQRQGGRTSSQRQRDPEPEPEPEPEGGRSRAGAQNDQLSTGPRAAPEEAETLAETEPERHLGSYLLDSENTSGALPRLPQTPKQPQKRSRAAFSHTQVIELERKFSHQKYLSAPERAHLAKNLKLTETQVKIWFQNRRYKTKRKQLSSELGDLEKHSSLPALKEEAFSRASLVSVYNSYPYYPYLYCVGSWSPAFW

SEQ ID NO: 843 - DNA, 729 bp, Homo sapiens
atgcagcatcaccaccatcaccacctcagggttccggagccgcggcccggggaggcgaaagcggagggggccgcgccgccgaccccgtccaagccgctcacgtccttcctcatccaggacatcctgcgggacggcgcgcagcggcaaggcggccgcacgagcagccagagacagcgcgacccggagccggagccagagccagagccagagggaggacgcagccgcgccggggcgcagaacgaccagctgagcaccgggccccgcgccgcgccggatgaggccgagacgctggcagagaccgagccagaaaggcacttggggtcttatctgttggactctgaaaacacttcaggcgcccttccaaggcttccccaaacccctaagcagccgcagaagcgctcccgagctgccttctcccacactcaggtgatcgagttggagaggaagttcagccatcagaagtacctgtcggcccctgaacgggcccacctggccaagaacctcaagctcacggagacccaagtgaagatatggttccagaacagacgctataagactaagcgaaagcagctctcctcggagctgggagacttggagaagcactcctttttgccggccctgaaagaggaggccttctcccgggcctccctggtctccgtgtataacagctatccttactacccatacctgcactgcgtgggcagctggagcccagctttttggtaatga

SEQ ID NO: 844 - DNA, 27 bp, Artificial Sequence
  PCR primer
ctactaagcgctggagtgagggatcag

SEQ ID NO: 845 - DNA, 33 bp, Artificial Sequence
  PCR primer
catcgagaattcactactctctgactagatgtc

SEQ ID NO: 846 - protein, 161 aa, Homo sapiens [sequence omitted]

SEQ ID NO: 847 - DNA, 489 bp, Homo sapiens
atgcagcatcaccaccatcaccacgctggagtgagggatcaggggcagggcgcgagatggcctcacacagggaagagagggcccctcctgcagggcctcacctgggccacaggaggacactgcttttcctctgaggagtcaggagctgtggatggtgctggacagaagaaggacagggcctggctcaggtgtccagaggctgtcgctggcttccctttgggatcagactgcagggagggagggcggcagggttgtggggggagtgacgatgaggatgacctgggggtggctccaggccttgcccctgcctgggccctcacccagcctccctcacagtctcctggccctcagtctctcccctccactccatcctccatctggcctcagtgggtcattctgatcactgaactgaccatacccagccctgcccacggccctccatggctccccaatgccctggagaggggacatctagtcagagagtagtga

SEQ ID NO: 848 - protein, 132 aa, Homo sapiens; identical to SEQ ID NO: 819

SEQ ID NO: 849 - DNA, 31 bp, Artificial Sequence
  PCR primer
ggggaattcatcacctatgtgccgcctctgc

SEQ ID NO: 850 - DNA, 40 bp, Artificial Sequence
  PCR primer
gggctcgagtcactcgcccacgaaatccgtgtaaaacagc

SEQ ID NO: 851 - DNA, 1203 bp, Homo sapiens
atgcatcaccatcaccatcacacggccgcgtccgataacttccagctgtcccagggtgggcagggattcgccattccgatcgggcaggcgatggcgatcgcgggccagatcaagcttcccaccgttcatatcgggcctaccgccttcctcggcttgggtgttgtcgacaacaacggcaacggcgcacgagtccaacgcgtggtcgggagcgctccggcggcaagtctcggcatctccaccggcgacgtgatcaccgcggtcgacggcgctccgatcaactcggccaccgcgatggcggacgcgcttaacgggcatcatcccggtgacgtcatctcggtgacctggcaaaccaagtcgggcggcacgcgtacagggaacgtgacattggccgagggacccccggccgaattcatcacctatgtgccgcctctgctgctggaagtgggggtagaggagaagttcatgaccatggtgctgggcattggtccagtgctgggcctggtctgtgtcccgctcctaggctcagccagtgaccactggcgtggacgctatggccgccgccggcccttcatctgggcactgtccttgggcatcctgctgagcctctttctcatcccaagggccggctggctagcagggctgctgtgcccggatcccaggcccctggagctggcactgctcatcctgggcgtggggctgctggacttctgtggccaggtgtgcttcactccactggaggccctgctctctgacctcttccgggacccggaccactgtcgccaggcctactctgtctatgccttcatgatcagtcttgggggctgcctgggctacctcctgcctgccattgactgggacaccagtgccctggccccctacctgggcacccaggaggagtgcctctttggcctgctcaccctcatcttcctcacctgcgtagcagccacactgctggtggctgaggaggcagcgctgggccccaccgagccagcagaagggctgtcggccccctccttgtcgccccactgctgtccatgccgggcccgcttggctttccggaacctgggcgccctgcttccccggctgcaccagctgtgctgccgcatgccccgcaccctgcgccggctcttcgtggctgagctgtgcagctggatggcactcatgaccttcacgctgttttacacggatttcgtgggcgagtga

SEQ ID NO: 852 - protein, 400 aa, Homo sapiens [sequence omitted]

SEQ ID NO: 853 - protein, 20 aa, Homo sapiens
LLPPPPALCGASACDVSVRV

SEQ ID NO: 854 - DNA, 60 bp, Homo sapiens
ctgctcccacctccacccgcgctctgcggggcctctgcctgtgatgtctccgtacgtgtg

SEQ ID NO: 855 - protein, 10 aa, Homo sapiens
ASACDVSVRV

SEQ ID NO: 856 - DNA, 30 bp, Homo sapiens
gcctctgcctgtgatgtctccgtacgtgtg

SEQ ID NO: 857 - protein, 9 aa, Homo sapiens
ASACDVSVR

SEQ ID NO: 858 - protein, 9 aa, Homo sapiens
SACDVSVRV

SEQ ID NO: 859 - DNA, 27 bp, Homo sapiens
tctgcctgtgatgtctccgtacgtgtg

SEQ ID NO: 860 - protein, 19 aa, Homo sapiens
GIGPVLGLVCVPLLGSASD

SEQ ID NO: 861 - protein, 19 aa, Homo sapiens
VPPLLLEVGVEEKFMTMVL

SEQ ID NO: 862 - protein, 19 aa, Homo sapiens
MVQRLWVSRLLRHRKAQLL

SEQ ID NO: 863 - DNA, 57 bp, Homo sapiens
  misc_feature (1)...(57): n = A,T,C or G
ggnathggnccngtnytnggnytngtntgygtnccnytnytnggnwsngcnwsngay

SEQ ID NO: 864 - DNA, 57 bp, Homo sapiens
  misc_feature (1)...(57): n = A,T,C or G
gtnccnccnytnytnytngargtnggngtngargaraarttyatgacnatggtnytn

SEQ ID NO: 865 - DNA, 57 bp, Homo sapiens
  misc_feature (1)...(57): n = A,T,C or G
atggtncarmgnytntgggtnwsnmgnytnytnmgncaymgnaargcncarytnytn

SEQ ID NO: 866 - protein, 9 aa, Homo sapiens
VLQCVNVSV

SEQ ID NO: 867 - protein, 9 aa, Homo sapiens
RMPTVLQCV

SEQ ID NO: 868 - protein, 9 aa, Homo sapiens
NLCKFTEWI

SEQ ID NO: 869 - protein, 9 aa, Homo sapiens
MLIKLDESV

SEQ ID NO: 870 - protein, 9 aa, Homo sapiens
LLANDLMLI

SEQ ID NO: 871 - protein, 10 aa, Homo sapiens
LLANGRMPTV

SEQ ID NO: 872 - protein, 10 aa, Homo sapiens
LMLIKLDESV

SEQ ID NO: 873 - protein, 10 aa, Homo sapiens
VLQCVNVSVV

SEQ ID NO: 874 - protein, 10 aa, Homo sapiens
GLLANGRMPT

SEQ ID NO: 875 - protein, 10 aa, Homo sapiens
TVLQCVNVSV

SEQ ID NO: 876 - protein, 9 aa, Homo sapiens
GVLVHPQWV

SEQ ID NO: 877 - protein, 9 aa, Homo sapiens
VLVHPQWVL

SEQ ID NO: 878 - DNA, 1195 bp, Homo sapiens
ccgagactcacggtcaagctaaggcgaagagtgggtggctgaagccatactattttatagaattaatggaaagcagaaaagacatcacaaaccaagaagaactttggaaaatgaagcctaggagaaatttagaagaagacgattatttgcataaggacacgggagagaccagcatgctaaaaagacctgtgcttttgcatttgcaccaaacagcccatgctgatgaatttgactgcccttcagaacttcagcacacacaggaactctttccacagtggcacttgccaattaaaatagctgctattatagcatctctgacttttctttacactcttctgagggaagtaattcaccctttagcaacttcccatcaacaatatttttataaaattccaatcctggtcatcaacaaagtcttgccaatggtttccatcactctcttggcattggtttacctgccaggtgtgatagcagcaattgtccaacttcataatggaaccaagtataagaagtttccacattggttggataagtggatgttaacaagaaagcagtttgggcttctcagtttcttttttgctgtactgcatgcaatttatagtctgtcttacccaatgaggcgatcctacagatacaagttgctaaactgggcatatcaacaggtccaacaaaataaagaagatgcctggattgagcatgatgtttggagaatggagatttatgtgtctctgggaattgtgggattggcaatactggctctgttggctgtgacatctattccatctgtgagtgactctttgacatggagagaatttcactatattcagagcaagctaggaattgtttcccttctactgggcacaatacacgcattgatttttgcctggaataagtggatagatataaaacaatttgtatggtatacacctccaacttttatgatagctgttttccttccaattgttgtcctgatatttaaaagcatactattcctgccatgcttgaggaagaagatactgaagattagacatggttgggaagacgtcaccaaaattaacaaaactgagatatgttcccagttgtagaattactgtttacacacatttttgttcaatattgatatattttatcaccaacatttcaagtttgtatttgttaataaaatgattattcaaggaaaaaaaaaaaaaaaaaa

SEQ ID NO: 879 - protein, 339 aa, Homo sapiens
MESRKDITNQEELWKMKPRRNLEEDDYLHKDTGETSMLKRPVLLHLHQTAHADEFDCPSELQHTQELFPQWHLPIKIAAIIASLTFLYTLLREVIHPLATSHQQYFYKIPILVINKVLPMVSITLLALVYLPGVIAAIVQLHNGTKYKKFPHWLDKWMLTRKQFGLLSFFFAVLHAIYSLSYPMRRSYRYKLLNWAYQQVQQNKEDAWIEHDVWRMEIYVSLGIVGLAILALLAVTSIPSVSDSLTWREFHYIQSKLGIVSLLLGTIHALIFAWNKWIDIKQFVWYTPPTFMIAVFLPIVVLIFKSILFLPCLRKKILKIRHGWEDVTKINKTEICSQL

SEQ ID NO: 880 - DNA, 2172 bp, Homo sapiens
aaaattgaatattgagataccattctttagtgttaccttttttacccacatgtgtttctgaaaatattggaattttattcatcttaaaaattggacccggccttatttaccatctttaatccattttagtactatgggtgagtacatggaattgaagtctggcttaaatcttcagaaagttatatatctattttattttatttttttgagacagagtctcgctgtgtcacccaggctggagtgcggtgccacaatcttggctcactgcaacctctgagtcccaggttcaagcgatactcatgcctcggcctcctgagtagctgggactacaggcgtgcaccaccacatctggctaatctttttttgtatttttagtagagacggggtttcactgtggtctccatctcctgacctcgtgatccgcctgcctcccaaagtgctgggattacaggcatgagccaccgcacacagctgggactgggtaatttataaagaaaagaggtttaatgactcacagttccgcatggctggagaggcctcaggaaacttacaatcatggtggaaggcgaaggggaagcaaggcacgtcttacatggtggcaggagagaacgagtgaggggggagactgccacaaactttttttttttgagacaagagtctggccctgttgcccaggctggagtgcagtggcatgatctcagctcactgcaacctctgcctcacaggttcaagcaattctcatgcctcagcctcccgcatagctgggaccacaggtatgcaccaccacacctagctaatttttgtagttttagtagagatggggtctcactatgttgctcaggctggtctaaaactcctgggctccagcaatccgcctgccttggcctcccaaagtgctggggttacaggcataagccaccacatccagcctgccacatacttttaaactatcaggtctcatgagaactcatgcactatcacaagaatagcatggggaaaatcccccccataatccaatcacctcccaccaggtctcctccgacacgtgggattgggtggggacacagagccaaaccgtatcagatgctgcaggggctggggacactgagaccactcagacctggtgtctctgtcactcttctgggctctgtctgtctccaggacctccctccccttccatggtatagaaggaaagtgctgtaaggtgcaaattgcacaggaactccttaagacatacatcatccactcagcagttttaggttcgcagcaaaatggagtggaaggaacagaaatttcctgtgcacccctccccgctgtctccgccatatcggcatcctgcatccagagtggtggactggttacaggctatgaacctacactgatgcggcaccaccacccagagtccacgggttatgttggttcacatttactcttgctgtggtatggtctataggtttggacagatgtccgataatcctttttacattttggcatccttgggtagctcgtcttgtaggaatggacttgcttcaaagtggaggcaggcagatccttcagacgggtatatggagccctgttttcagttgcttttctaattctctcttatcgtttacctcaaaatcttcctgaggtctcgcttccttttaaaatccttgtctactttgcagcatcactctgacactccattgattcctcagcacctactgactacacggttaggagtgcaagggtagaattcatgttttattcatctttgggtctgtagcacccagcaaagtgctcagtaaatgcgcagtaattgatttgacctctgaacaaatacacactgtactaagaatctacacaccgaaagacaaaaacaagacaaatttgagtgctacaggtgtcacgcttggcatcacacatgtgcctgtgtattcctctaggtggttaccaggagctctgccactgcatgtccactagtgacgggttcgctccaccaccccagctgggtagccgctgctctcacataaggggtccaattaaaattgccaggaataaattcccccggactttgacttctcaagagctaagaaggtttgctgagtattctggcatgatgtttggtgatcaaacaactgctggccaaaaatgatgagtatttccccctcttgctgaagatgtgctccatac

SEQ ID NO: 881 - DNA, 2455 bp, Homo sapiens
cagcttaaaaatggtttcttgaaatcagtgattagcattcactcaccagtacccctactaaggggtaggcactggtttgtactcctgggaatacaggagtacaccagaatttatttctgcttattgcttttgttgcaaatgccgtggcttcatctgaggaattctagaattcagagggtgtagccctccactctgctgtcttgctatctgctctcattgcatccgtttaacctgcattctgaaagatgtttctcaggtttttccttgacgattttcttcttttctgattctgacaatgttttaaatcattgtactgtggttatcatttctctgcatttattttacccatcttcctttgtaacttgtcctattgtcttttaatttctgcctgttctttatggctttcaacttcataaataacatgttttctcaaatctctttgtgaattccagagagggccaggcacggtggctcacatctgtaatcccagcactttggggaggctgagacgggtggatcacttgaggtcaggagtttgagaccagcctggccaacatggtgaaatcccgtttcactaaaaatacaaaaattacccaggcatggtggcgggcgcctgtaatcccaggtactcgggaggctgagggaggagaatcgcttgaacctgggaggctgagggaggagaatcgcttgaacccgggaggcagaggttgcagtgaaccgagatcatgttgctgcactccagcctggtcaacagagcaagactctgcctcaaaaacaaacaaataaacaaacaaacaaacaaaacagagagattttgctgcaatgtacaaggagcaatttgctcctttaaaaaaataatttttggccaggcacagtggctcacacctgtaatcccagcactttgggaagccaaggtgggtggatcatttgaggtcaggagtttgagatcagcctggccaacatggtgaaacactatctctattaaaaatacaaaaatgtgctcagtgtggtggtgcacatctgtaatctcagcctcccgcatagctgggaccacaggtatgcaccaccacacctagctaatttttgtagttttagtagagatggggtctcactatgttgctcaggctggtctaaaactcctgggctccagcaatccgcctgccttggcctcccaaagtgctggggttacaggcataagccaccacatccagcctgccacatacttttaaactatcaggtctcatgagaactcatgcactatcacaagaatagcatggggaaaatcccccccataatccaatcacctcccaccaggtctcctccgacacgtgggattgggtggggacacagagccaaaccgtatcagatgctgcaggggctggggacactgagaccactcagacctggtgtctctgtcactcttctgggctctgtctgtctccaggacctccctccccttccatggtatagaaggaaagtgctgtaaggtgcaaattgcacaggaactccttaagacatacatcatccactcagcagttttaggttcgcagcaaaatggagtggaaggaacagaaatttcctgtgcacccctccccgctgtctccgccatatcggcatcctgcatccagagtggtggactggttacaggctatgaacctacactgatgcggcaccaccacccagagtccacaggttatgttggttcacatttactcttgctgtggtatggtctataggtttggacagatgtccgataatcctttttacattttggcatccttgggtagctcgtcttgtaggaatggacttgcttcaaagtggaggcaggcagatccttcagacgggtatatggagccctgttttcagttgcttttctaattctctcttatcgtttacctcaaaatcttcctgaggtctcgcttccttttaaaatccttgtctactttgcagcatcactctgacactccattgattcctcagcacctactgactacacggttaggagtgcaagggtagaattcatgttttattcatctttgggtctgtagcacccagcaaagtgctcagtaaatgcgcagtaattgatttgacctctgaacaaatacacactgtactaagaatctacacaccgaaagacaaaaacaagacaaatttgagtgctacaggtgtcacgcttggcatcacacatgtgcctgtgtattcctctaggtggttaccaggagctctgccactgcatgtccactagtgacgggttcgctccaccaccccagctgggtagccgctgctctcacataaggggtccaattaaaattgccaggaataaattcccccggactttgacttctcaagagctaagaaggtttgctgagtattctggcatgatgtttggtgatcaaacaactgctggccaaaaatgatgagtatttccccctcttgctgaagatgtgctccatac

SEQ ID NO: 882 - DNA, 2455 bp, Homo sapiens; identical to SEQ ID NO: 881

SEQ ID NO: 883 - protein, 62 aa, Homo sapiens; identical to SEQ ID NO: 574

SEQ ID NO: 884 - protein, 135 aa, Homo sapiens [sequence omitted]

SEQ ID NO: 885 - protein, 77 aa, Homo sapiens
MHYHKNSMGKIPPIIQSPPTRSPPTRGIGWGHRAKPYQMLQGLGTLRPLRPGVSVTLLGSVCLQDLPPLPWYRRKVL

SEQ ID NO: 886 - protein, 60 aa, Homo sapiens; identical to SEQ ID NO: 586

SEQ ID NO: 887 - protein, 76 aa, Homo sapiens; identical to SEQ ID NO: 584

SEQ ID NO: 888 - protein, 76 aa, Homo sapiens; identical to SEQ ID NO: 575

SEQ ID NO: 889 - protein, 80 aa, Homo sapiens [sequence omitted]

SEQ ID NO: 890 - protein, 72 aa, Homo sapiens
MHYHKNSMGKIPPHNPITSHQVSSDTWDWVGTQSQTVSDAAGAGDTETTQTWCLCHSSGLCLSPGPPSPSMV

SEQ ID NO: 891 - protein, 77 aa, Homo sapiens; identical to SEQ ID NO: 885

SEQ ID NO: 892 - protein, 60 aa, Homo sapiens; identical to SEQ ID NO: 586

SEQ ID NO: 893 - protein, 76 aa, Homo sapiens; identical to SEQ ID NO: 584

SEQ ID NO: 894 - DNA, 2479 bp, Homo sapiens
gtcatattgaacattccagatacctatcattactcgatgctgttgataacagcaagatggctttgaactcagggtcaccaccagctattggaccttactatgaaaaccatggataccaaccggaaaacccctatcccgcacagcccactgtggtccccactgtctacgaggtgcatccggctcagtactacccgtcccccgtgccccagtacgccccgagggtcctgacgcaggcttccaaccccgtcgtctgcacgcagcccaaatccccatccgggacagtgtgcacctcaaagactaagaaagcactgtgcatcaccttgaccctggggaccttcctcgtgggagctgcgctggccgctggcctactctggaagttcatgggcagcaagtgctccaactctgggatagagtgcgactcctcaggtacctgcatcaacccctctaactggtgtgatggcgtgtcacactgccccggcggggaggacgagaatcggtgtgttcgcctctacggaccaaacttcatccttcagatgtactcatctcagaggaagtcctggcaccctgtgtgccaagacgactggaacgagaactacgggcgggcggcctgcagggacatgggctataagaataatttttactctagccaaggaatagtggatgacagcggatccaccagctttatgaaactgaacacaagtgccggcaatgtcgatatctataaaaaactgtaccacagtgatgcctgttcttcaaaagcagtggtttctttacgctgtttagcctgcggggtcaacttgaactcaagccgccagagcaggatcgtgggcggtgagagcgcgctcccgggggcctggccctggcaggtcagcctgcacgtccagaacgtccacgtgtgcggaggctccatcatcacccccgagtggatcgtgacagccgcccactgcgtggaaaaacctcttaacaatccatggcattggacggcatttgcggggattttgagacaatctttcatgttctatggagccggataccaagtacaaaaagtgatttctcatccaaattatgactccaagaccaagaacaatgacattgcgctgatgaagctgcagaagcctctgactttcaacgacctagtgaaaccagtgtgtctgcccaacccaggcatgatgctgcagccagaacagctctgctggatttccgggtggggggccaccgaggagaaagggaagacctcagaagtgctgaacgctgccaaggtgcttctcattgagacacagagatgcaacagcagatatgtctatgacaacctgatcacaccagccatgatctgtgccggcttcctgcaggggaacgtcgattcttgccagggtgacagtggagggcctctggtcacttcgaacaacaatatctggtggctgataggggatacaagctggggttctggctgtgccaaagcttacagaccaggagtgtacgggaatgtgatggtattcacggactggatttatcgacaaatgaaggcaaacggctaatccacatggtcttcgtccttgacgtcgttttacaagaaaacaatggggctggttttgcttccccgtgcatgatttactcttagagatgattcagaggtcacttcatttttattaaacagtgaacttgtctggctttggcactctctgccatactgtgcaggctgcagtggctcccctgcccagcctgctctccctaaccccttgtccgcaaggggtgatggccggctggttgtgggcactggcggtcaattgtggaaggaagagggttggaggctgcccccattgagatcttcctgctgagtcctttccaggggccaattttggatgagcatggagctgtcacttctcagctgctggatgacttgagatgaaaaaggagagacatggaaagggagacagccaggtggcacctgcagcggctgccctctggggccacttggtagtgtccccagcctacttcacaaggggattttgctgatgggttcttagagccttagcagccctggatggtggccagaaataaagggaccagcccttcatgggtggtgacgtggtagtcacttgtaaggggaacagaaacatttttgttcttatggggtgagaatatagacagtgcccttggtgcgagggaagcaattgaaaaggaacttgccctgagcactcctggtgcaggtctccacctgcacattgggtggggctcctgggagggagactcagccttcctcctcatcctccctgaccctgctcctagcaccctggagagtgaatgccccttggtccctggcagggcgccaagtttggcaccatgtcggcctcttcaggcctgatagtcattggaaattgaggtccatgggggaaatcaaggatgctcagtttaaggtacactgtttccatgttatgtttctacacattgatggtggtgaccctgagttcaaagccatctt

SEQ ID NO: 895 - protein, 492 aa, Homo sapiens
MALNSGSPPAIGPYYENHGYQPENPYPAQPTVVPTVYEVHPAQYYPSPVPQYAPRVLTQASNPVVCTQPKSPSGTVCTSKTKKALCITLTLGTFLVGAALAAGLLWKFMGSKCSNSGIECDSSGTCINPSNWCDGVSHCPGGEDENRCVRLYGPNFILQMYSSQRKSWHPVCQDDWNENYGRAACRDMGYKNNFYSSQGIVDDSGSTSFMKLNTSAGNVDIYKKLYHSDACSSKAVVSLRCLACGVNLNSSRQSRIVGGESALPGAWPWQVSLHVQNVHVCGGSIITPEWIVTAAHCVEKPLNNPWHWTAFAGILRQSFMFYGAGYQVQKVISHPNYDSKTKNNDIALMKLQKPLTFNDLVKPVCLPNPGMMLQPEQLCWISGWGATEEKGKTSEVLNAAKVLLIETQRCNSRYVYDNLITPAMICAGFLQGNVDSCQGDSGGPLVTSNNNIWWLIGDTSWGSGCAKAYRPGVYGNVMVFTDWIYRQMKANG

SEQ ID NO: 896 - DNA, 683 bp, Homo sapiens
gtcatattgaacattccagatacctatcattactcgatgctgttgataacagcaagatggctttgaactcagggtcaccaccagctattggaccttactatgaaaaccatggataccaaccggaaaacccctatcccgcacagcccactgtggtccccactgtctacgaggtgcatccggctcagtactacccgtcccccgtgccccagtacgccccgagggtcctgacgcaggcttccaaccccgtcgtctgcacgcagcccaaatccccatccgggacagtgtgcacctcaaagactaagaaagcactgtgcatcaccttgaccctggggaccttcctcgtgggagctgcgctggccgctggcctactctggaagttcatgggcagcaagtgctccaactctgggatagagtgcgactcctcaggtacctgcatcaacccctctaactggtgtgatggcgtgtcacactgccccggcggggaggacgagaatcggtgtgttcgcctctacggaccaaacttcatccttcagatgtactcatctcagaggaagtcctggcaccctgtgtgccaagacgactggaacgagaactacgggcgggcggcctgcagggacatgggctataagaataatttttactctagccaaggaatagtggatgacagcggatccaccagcttt

SEQ ID NO: 897 - protein, 209 aa, Homo sapiens
MALNSGSPPAIGPYYENHGYQPENPYPAQPTVVPTVYEVHPAQYYPSPVPQYAPRVLTQASNPVVCTQPKSPSGTVCTSKTKKALCITLTLGTFLVGAALAAGLLWKFMGSKCSNSGIECDSSGTCINPSNWCDGVSHCPGGEDENRCVRLYGPNFILQMYSSQRKSWHPVCQDDWNENYGRAACRDMGYKNNFYSSQGIVDDSGSTSF

SEQ ID NO: 898 - protein, 27 aa, Homo sapiens
VGEGLYQGVPRAEPGTEARRHYDEGVR

SEQ ID NO: 899 - DNA, 35 bp, Artificial Sequence
  PCR primer
ggatccgccgccaccatgtcactttctagcctgct

SEQ ID NO: 900 - DNA, 27 bp, Artificial Sequence
  PCR primer
gtcgactcagctggaccacagccgcag

SEQ ID NO: 901 - DNA, 34 bp, Artificial Sequence
  PCR primer
ggatccgccgccaccatgggctgcaggctgctct

SEQ ID NO: 902 - DNA, 27 bp, Artificial Sequence
  PCR primer
gtcgactcagaaatcctttctcttgac

SEQ ID NO: 903 - DNA, 936 bp, Homo sapiens
  misc_feature (1)...(): n = A,T,C or G
atgggctgcaggctgntctgctgtgcggttctctgtctcctgggagcggtccccatggaaacgggagttacgcagacaccaagacacctggtcatgggaatgacaaataagaagtctttgaaatgtgaacaacatctgggtcataacgctatgtattggtacaagcaaagtgctaagaagccactggagctcatgtttgtctacagtcttgaagaacgggttgaaaacaacagtgtgccaagtcgcttctcacctgaatgccccaacagctctcacttattccttcacctacacaccctgcagccagaagactcggccctgtatctctgcgccagcagccaagaccggacaagcagctcctacgagcagtacttcgggccgggcaccaggctcacggtcacagaggacctgaaaaacgtgttcccacccgaggtcgctgtgtttgagccatcagaagcagagatctcccacacccaaaaggccacactggtgtgcctggccacaggcttctaccccgaccacgtggagctgagctggtgggtgaatgggaaggaggtgcacagtggggtcagcacagacccgcagcccctcaaggagcagcccgccctcaatgactccagatactgcctgagcagccgcctgagggtctcggccaccttctggcagaacccccgcaaccacttccgctgtcaagtccagttctacgggctctcggagaatgacgagtggacccaggatagggccaaacctgtcacccagatcgtcagcgccgaggcctggggtagagcagactgtggcttcacctccgagtcttaccagcaaggggtcctgtctgccaccatcctctatgagatcttgctagggaaggccaccttgtatgccgtgctggtcagtgccctcgtgctgatggccatggtcaagagaaaggatttctga

SEQ ID NO: 904 - DNA, 834 bp, Homo sapiens
  misc_feature (1)...(): n = A,T,C or G
atgtcactttctagcctgctnaaggtggtcacagcttcactgtggctaggacctggcattgcccagaagataactcaaacccaaccaggaatgttcgtgcaggaaaaggaggctgtgactctggactgcacatatgacaccagtgatcaaagttatggtctcttctggtacaagcagcccagcagtggggaaatgatttttcttatttatcaggggtcttatgacgagcaaaatgcaacagaaggtcgctactcattgaatttccagaaggcaagaaaatccgccaaccttgtcatctccgcttcacaactgggggactcagcaatgtatttctgtgcaatgagagagggcgcgggaggaggaaacaaactcacctttgggacaggcactcagctaaaagtggaactcaatatccagaaccctgaccctgccgtgtaccagctgagagactctaaatccagtgacaagtctgtctgcctattcaccgattttgattctcaaacaaatgtgtcacaaagtaaggattctgatgtgtatatcacagacaaaactgtgctagacatgaggtctatggacttcaagagcaacagtgctgtggcctggagcaacaaatctgactttgcatgtgcaaacgccttcaacaacagcattattccagaagacaccttcttccccagcccagaaagttcctgtgatgtcaagctggtcgagaaaagctttgaaacagatacgaacctaaactttcaaaacctgtcagtgattgggttccgaatcctcctcctgaaagtggccgggtttaatctgctcatgacgctgcggctgtggtccagctga

SEQ ID NO: 905 - protein, 311 aa, Homo sapiens
  variant (1)...(311): Xaa = Any amino acid
MGCRLXCCAVLCLLGAVPMETGVTQTPRHLVMGMTNKKSLKCEQHLGHNAMYWYKQSAKKPLELMFVYSLEERVENNSVPSRFSPECPNSSHLFLHLHTLQPEDSALYLCASSQDRTSSSYEQYFGPGTRLTVTEDLKNVFPPEVAVFEPSEAEISHTQKATLVCLATGFYPDHVELSWWVNGKEVHSGVSTDPQPLKEQPALNDSRYCLSSRLRVSATFWQNPRNHFRCQVQFYGLSENDEWTQDRAKPVTQIVSAEAWGRADCGFTSESYQQGVLSATILYEILLGKATLYAVLVSALVLMAMVKRKDF

SEQ ID NO: 906 - protein, 277 aa, Homo sapiens
MSLSSLLKVVTASLWLGPGIAQKITQTQPGMFVQEKEAVTLDCTYDTSDQSYGLFWYKQPSSGEMIFLIYQGSYDEQNATEGRYSLNFQKARKSANLVISASQLGDSAMYFCAMREGAGGGNKLTFGTGTQLKVELNIQNPDPAVYQLRDSKSSDKSVCLFTDFDSQTNVSQSKDSDVYITDKTVLDMRSMDFKSNSAVAWSNKSDFACANAFNNSIIPEDTFFPSPESSCDVKLVEKSFETDTNLNFQNLSVIGFRILLLKVAGFNLLMTLRLWSS

SEQ ID NO: 907 - DNA, 1536 bp, Homo sapiens
atgtacaacctgttgctgtcctacgacagacatggggaccacctgcagcccctggacctcgtgcccaatcaccagggtctcacccctttcaagctggctggagtggagggtaacactgtgatgtttcagcacctgatgcagaagcggaagcacacccagtggacgtatggaccactgacctcgactctctatgacctcacagagatcgactcctcaggggatgagcagtccctgctggaacttatcatcaccaccaagaagcgggaggctcgccagatcctggaccagacgccggtgaaggagctggtgagcctcaagtggaagcggtacgggcggccgtacttctgcatgctgggtgccatatatctgctgtacatcatctgcttcaccatgtgctgcatctaccgccccctcaagcccaggaccaataaccgcacgagcccccgggacaacaccctcttacagcagaagctacttcaggaagcctacatgacccctaaggacgatatccggctggtcggggagctggtgactgtcattggggctatcatcatcctgctggtagaggttccagacatcttcagaatgggggtcactcgcttctttggacagaccatccttgggggcccattccatgtcctcatcatcacctatgccttcatggtgctggtgaccatggtgatgcggctcatcagtgccagcggggaggtggtacccatgtcctttgcactcgtgctgggctggtgcaacgtcatgtacttcgcccgaggattccagatgctaggccccttcaccatcatgattcagaagatgatttttggcgacctgatgcgattctgctggctgatggctgtggtcatcctgggctttgcttcagccttctatatcatcttccagacagaggaccccgaggagctaggccacttctacgactaccccatggccctgttcagcaccttcgagctgttccttaccatcatcgatggcccagccaactacaacgtggacctgcccttcatgtacagcatcacctatgctgcctttgccatcatcgccacactgctcatgctcaacctcctcattgccatgatgggcgacactcactggcgagtggcccatgagcgggatgagctgtggagggcccagattgtggccaccacggtgatgctggagcggaagctgcctcgctgcctgtggcctcgctccgggatctgcggacgggagtatggcctgggagaccgctggttcctgcgggtggaagacaggcaagatctcaaccggcagcggatccaacgctacgcacaggccttccacacccggggctctgaggatttggacaaagactcagtggaaaaactagagctgggctgtcccttcagcccccacctgtcccttcctatgccctcagtgtctcgaagtacctcccgcagcagtgccaattgggaaaggcttcggcaagggaccctgaggagagacctgcgtgggataatcaacaggggtctggaggacggggagagctgggaatatcagatctga

SEQ ID NO: 908 - DNA, 1533 bp, Homo sapiens
atgtacaacctgttgctgtcctacgacagacatggggaccacctgcagcccctggacctcgtgcccaatcaccagggtctcacccctttcaagctggctggagtggagggtaacactgtgatgtttcagcacctgatgcagaagcggaagcacacccagtggacgtatggaccactgacctcgactctctatgacctcacagagatcgactcctcaggggatgagcagtccctgctggaacttatcatcaccaccaagaagcgggaggctcgccagatcctggaccagacgccggtgaaggagctggtgagcctcaagtggaagcggtacgggcggccgtacttctgcatgctgggtgccatatatctgctgtacatcatctgcttcaccatgtgctgcatctaccgccccctcaagcccaggaccaataaccgcacgagcccccgggacaacaccctcttacagcagaagctacttcaggaagcctacatgacccctaaggacgatatccggctggtcggggagctggtgactgtcattggggctatcatcatcctgctggtagaggttccagacatcttcagaatgggggtcactcgcttctttggacagaccatccttgggggcccattccatgtcctcatcatcacctatgccttcatggtgctggtgaccatggtgatgcggctcatcagtgccagcggggaggtggtacccatgtcctttgcactcgtgctgggctggtgcaacgtcatgtacttcgcccgaggattccagatgctaggccccttcaccatcatgattcagaagatgatttttggcgacctgatgcgattctgctggctgatggctgtggtcatcctgggctttgcttcagccttctatatcatcttccagacagaggaccccgaggagctaggccacttctacgactaccccatggccctgttcagcaccttcgagctgttccttaccatcatcgatggcccagccaactacaacgtggacctgcccttcatgtacagcatcacctatgctgcctttgccatcatcgccacactgctcatgctcaacctcctcattgccatgatgggcgacactcactggcgagtggcccatgagcgggatgagctgtggagggcccagattgtggccaccacggtgatgctggagcggaagctgcctcgctgcctgtggcctcgctccgggatctgcggacgggagtatggcctgggagaccgctggttcctgcgggtggaagacaggcaagatctcaaccggcagcggatccaacgctacgcacaggccttccacacccggggctctgaggatttggacaaagactcagtggaaaaactagagctgggctgtcccttcagcccccacctgtcccttcctatgccctcagtgtctcgaagtacctcccgcagcagtgccaattgggaaaggcttcggcaagggaccctgaggagagacctgcgtgggataatcaacaggggtctggaggacggggagagctgggaatatcagatc

SEQ ID NO: 909 - protein, 511 aa, Homo sapiens
MYNLLLSYDRHGDHLQPLDLVPNHQGLTPFKLAGVEGNTVMFQHLMQKRKHTQWTYGPLTSTLYDLTEIDSSGDEQSLLELIITTKKREARQILDQTPVKELVSLKWKRYGRPYFCMLGAIYLLYIICFTMCCIYRPLKPRTNNRTSPRDNTLLQQKLLQEAYMTPKDDIRLVGELVTVIGAIIILLVEVPDIFRMGVTRFFGQTILGGPFHVLIITYAFMVLVTMVMRLISASGEVVPMSFALVLGWCNVMYFARGFQMLGPFTIMIQKMIFGDLMRFCWLMAVVILGFASAFYIIFQTEDPEELGHFYDYPMALFSTFELFLTIIDGPANYNVDLPFMYSITYAAFAIIATLLMLNLLIAMMGDTHWRVAHERDELWRAQIVATTVMLERKLPRCLWPRSGICGREYGLGDRWFLRVEDRQDLNRQRIQRYAQAFHTRGSEDLDKDSVEKLELGCPFSPHLSLPMPSVSRSTSRSSANWERLRQGTLRRDLRGIINRGLEDGESWEYQI

SEQ ID NO: 910 - protein, 134 aa, Homo sapiens
MYNLLLSYDRHGDHLQPLDLVPNHQGLTPFKLAGVEGNTVMFQHLMQKRKHTQWTYGPLTSTLYDLTEIDSSGDEQSLLELIITTKKREARQILDQTPVKELVSLKWKRYGRPYFCMLGAIYLLYIICFTMCCI

SEQ ID NO: 911 - protein, 55 aa, Homo sapiens
AYRPLKPRTNNRTSPRDNTLLQQKLLQEAYMTPKDDIRLVGELVTVIGAIIILLV

SEQ ID NO: 912 - protein, 39 aa, Homo sapiens
EVPDIFRMGVTRFFGQTILGGPFHVLIITYAFMVLVTMV

SEQ ID NO: 913 - protein, 19 aa, Homo sapiens
MRLISASGEVVPMSFALVL

SEQ ID NO: 914 - protein, 52 aa, Homo sapiens
GWCNVMYFARGFQMLGPFTIMIQKMIFGDLMRFCWLMAVVILGFASAFYIIF

SEQ ID NO: 915 - protein, 213 aa, Homo sapiens
QTEDPEELGHFYDYPMALFSTFELFLTIIDGPANYNVDLPFMYSITYAAFAIIATLLMLNLLIAMMGDTHWRVAHERDELWRAQIVATTVMLERKLPRCLWPRSGICGREYGLGDRWFLRVEDRQDLNRQRIQRYAQAFHTRGSEDLDKDSVEKLELGCPFSPHLSLPMPSVSRSTSRSSANWERLRQGTLRRDLRGIINRGLEDGESWEYQI

SEQ ID NO: 916 - DNA, 1302 bp, Homo sapiens
tggacaaagggggtcacacattccttccatacggttgagcctctacctgcctggtgctggtcacagttcagcttcttcatgatggtggatcccaatggcaatgaatccagtgctacatacttcatcctaataggcctccctggtttagaagaggctcagttctggttggccttcccattgtgctccctctaccttattgctgtgctaggtaacttgacaatcatctacattgtgcggactgagcacagcctgcatgagcccatgtatatatttctttgcatgctttcaggcattgacatcctcatctccacctcatccatgcccaaaatgctggccatcttctggttcaattccactaccatccagtttgatgcttgtctgctacagatgtttgccatccactccttatctggcatggaatccacagtgctgctggccatggcttttgaccgctatgtggccatctgtcacccactgcgccatgccacagtacttacgttgcctcgtgtcaccaaaattggtgtggctgctgtggtgcggggggctgcactgatggcaccccttcctgtcttcatcaagcagctgcccttctgccgctccaatatcctttcccattcctactgcctacaccaagatgtcatgaagctggcctgtgatgatatccgggtcaatgtcgtctatggccttatcgtcatcatctccgccattggcctggactcacttctcatctccttctcatatctgcttattcttaagactgtgttgggcttgacacgtgaagcccaggccaaggcatttggcacttgcgtctctcatgtgtgtgctgtgttcatattctatgtacctttcattggattgtccatggtgcatcgctttagcaagcggcgtgactctccgctgcccgtcatcttggccaatatctatctgctggttcctcctgtgctcaacccaattgtctatggagtgaagacaaaggagattcgacagcgcatccttcgacttttccatgtggccacacacgcttcagagccctaggtgtcagtgatcaaacttcttttccattcagagtcctctgattcagattttaatgttaacattttggaagacagtattcagaaaaaaaatttccttaataaaaatacaactcagatccttcaaatatgaaactggttggggaatctccattttttcaatattattttcttctttgttttcttgctacatataattattaataccctgactaggttgtggtttgagggttattacttttcattttaccatgcagtccaaatctaaact

SEQ ID NO: 917 - DNA, 2061 bp, Homo sapiens
acgattcgacagcgcatccttcgacttttccatgtggccacacacgcttcagagccctaggtgtcagtgatcaaacttcttttccattcagagtcctctgattcagattttaatgttaacattttggaagacagtattcagaaaaaaaatttccttaataaaaatacaactcagatccttcaaatatgaaactggttggggaatctccattttttcaatattattttcttctttgttttcttgctacatataattattaataccctgactaggttgtggttggagggttattacttttcattttaccatgcagtccaaatctaaactgcttctactgatggtttacagcattctgagataagaatggtacatctagagaacatttgccaaaggcctaagcacggcaaaggaaaataaacacagaatataataaaatgagataatctagcttaaaactataacttcctcttcagaactcccaaccacattggatctcagaaaaatgctgtcttcaaaatgacttctacagagaagaaataatttttcctctggacactagcacttaaggggaagattggaagtaaagccttgaaaagagtacatttacctacgttaatgaaagttgacacactgttctgagagttttcacagcatatggaccctgtttttcctatttaattttcttatcaaccctttaattaggcaaagatattattagtaccctcattgtagccatgggaaaattgatgttcagtggggatcagtgaattaaatggggtcatacaagtataaaaattaaaaaaaaaggacttcatgcccaatctcatatgatgtggaagaactgttagagagaccaacagggtagtgggttagagatttccagagtcttacattttctagaggaggtatttaatttcttctcactcatccagtgttgtatttaggaatttcctggcaacagaactcatggctttaatcccactagctattgcttattgtcctggtccaattgccaattacctgtgtcttggaagaagtgatttctaggttcaccattatggaagattcttattcagaaagtctgcatagggcttatagcaagttatttatttttaaaagttccataggtgattctgataggcagtgaggttagggagccaccagttatgatgggaagtatggaatggcaggtcttgaagataacattggccttttgagtgtgactcgtagctggaaagtgagggaatcttcaggaccatgctttatttggggctttgtgcagtatggaacagggactttgagaccaggaaagcaatctgacttaggcatgggaatcaggcatttttgcttctgaggggctattaccaagggttaataggtttcatcttcaacaggatatgacaacagtgttaaccaagaaactcaaattacaaatactaaaacatgtgatcatatatgtggtaagtttcattttctttttcaatcctcaggttccctgatatggattcctataacatgctttcatccccttttgtaatggatatcatatttggaaatgcctatttaatacttgtatttgctgctggactgtaagcccatgagggcactgtttattattgaatgtcatctctgttcatcattgactgctctttgctcatcattgaatcccccagcaaagtgcctagaacataatagtgcttatgcttgacaccggttatttttcatcaaacctgattccttctgtcctgaacacatagccaggcaattttccagccttctttgagttgggtattattaaattctggccattacttccaatgtgagtggaagtgacatgtgcaatttctatacctggctcataaaaccctcccatgtgcagcctttcatgttgacattaaatgtgacttgggaagctatgtgttacacagagtaaatcaccagaagcctggatttctgaaaaaactgtgcagagccaaacctctgtcatttgcaactcccacttgtatttgtacgaggcagttggataagtgaaaaataaagtactattgtgtcaagtctctg

SEQ ID NO: 918 - DNA, 957 bp, Homo sapiens
atgatggtggatcccaatggcaatgaatccagtgctacatacttcatcctaataggcctccctggtttagaagaggctcagttctggttggccttcccattgtgctccctctaccttattgctgtgctaggtaacttgacaatcatctacattgtgcggactgagcacagcctgcatgagcccatgtatatatttctttgcatgctttcaggcattgacatcctcatctccacctcatccatgcccaaaatgctggccatcttctggttcaattccactaccatccagtttgatgcttgtctgctacagatgtttgccatccactccttatctggcatggaatccacagtgctgctggccatggcttttgaccgctatgtggccatctgtcacccactgcgccatgccacagtacttacgttgcctcgtgtcaccaaaattggtgtggctgctgtggtgcggggggctgcactgatggcaccccttcctgtcttcatcaagcagctgcccttctgccgctccaatatcctttcccattcctactgcctacaccaagatgtcatgaagctggcctgtgatgatatccgggtcaatgtcgtctatggccttatcgtcatcatctccgccattggcctggactcacttctcatctccttctcatatctgcttattcttaagactgtgttgggcttgacacgtgaagcccaggccaaggcatttggcacttgcgtctctcatgtgtgtgctgtgttcatattctatgtacctttcattggattgtccatggtgcatcgctttagcaagcggcgtgactctccgctgcccgtcatcttggccaatatctatctgctggttcctcctgtgctcaacccaattgtctatggagtgaagacaaaggagattcgacagcgcatccttcgacttttccatgtggccacacacgcttcagagccctag

SEQ ID NO: 919 - DNA, 954 bp, Homo sapiens
atgatggtggatcccaatggcaatgaatccagtgctacatacttcatcctaataggcctccctggtttagaagaggctcagttctggttggccttcccattgtgctccctctaccttattgctgtgctaggtaacttgacaatcatctacattgtgcggactgagcacagcctgcatgagcccatgtatatatttctttgcatgctttcaggcattgacatcctcatctccacctcatccatgcccaaaatgctggccatcttctggttcaattccactaccatccagtttgatgcttgtctgctacagatgtttgccatccactccttatctggcatggaatccacagtgctgctggccatggcttttgaccgctatgtggccatctgtcacccactgcgccatgccacagtacttacgttgcctcgtgtcaccaaaattggtgtggctgctgtggtgcggggggctgcactgatggcaccccttcctgtcttcatcaagcagctgcccttctgccgctccaatatcctttcccattcctactgcctacaccaagatgtcatgaagctggcctgtgatgatatccgggtcaatgtcgtctatggccttatcgtcatcatctccgccattggcctggactcacttctcatctccttctcatatctgcttattcttaagactgtgttgggcttgacacgtgaagcccaggccaaggcatttggcacttgcgtctctcatgtgtgtgctgtgttcatattctatgtacctttcattggattgtccatggtgcatcgctttagcaagcggcgtgactctccgctgcccgtcatcttggccaatatctatctgctggttcctcctgtgctcaacccaattgtctatggagtgaagacaaaggagattcgacagcgcatccttcgacttttccatgtggccacacacgcttcagagccc

SEQ ID NO: 920 - protein, 318 aa, Homo sapiens
MMVDPNGNESSATYFILIGLPGLEEAQFWLAFPLCSLYLIAVLGNLTIIYIVRTEHSLHEPMYIFLCMLSGIDILISTSSMPKMLAIFWFNSTTIQFDACLLQMFAIHSLSGMESTVLLAMAFDRYVAICHPLRHATVLTLPRVTKIGVAAVVRGAALMAPLPVFIKQLPFCRSNILSHSYCLHQDVMKLACDDIRVNVVYGLIVIISAIGLDSLLISFSYLLILKTVLGLTREAQAKAFGTCVSHVCAVFIFYVPFIGLSMVHRFSKRRDSPLPVILANIYLLVPPVLNPIVYGVKTKEIRQRILRLFHVATHASEP

SEQ ID NO: 921 - protein, 28 aa, Homo sapiens
MMVDPNGNESSATYFILIGLPGLEEAQF

SEQ ID NO: 922 - protein, 9 aa, Homo sapiens
RTEHSLHEP

SEQ ID NO: 923 - protein, 21 aa, Homo sapiens
KMLAIFWFNSTTIQFDACLLQ

SEQ ID NO: 924 - protein, 20 aa, Homo sapiens
DRYVAICHPLRHATVLTLPR

SEQ ID NO: 925 - protein, 37 aa, Homo sapiens
FIKQLPFCRSNILSHSYCLHQDVMKLACDDIRVNVVY

SEQ ID NO: 926 - protein, 13 aa, Homo sapiens
KTVLGLTREAQAK

SEQ ID NO: 927 - protein, 10 aa, Homo sapiens
VHRFSKRRDS

SEQ ID NO: 928 - protein, 22 aa, Homo sapiens
KTKEIRQRILRLFHVATHASEP

SEQ ID NO: 929 - DNA, 3245 bp, Homo sapiens
gtcgacccacgcgtccgcgcgagctaagcaggaggcggaggcggaggcggagggcgaggggcggggagcgccgcctggagcgcggcaggtcatattgaacattccagatacctatcattactcgatgctgttgataacagcaagatggctttgaactcagggtcaccaccagctattggaccttactatgaaaaccatggataccaaccggaaaacccctatcccgcacagcccactgtggtccccactgtctacgaggtgcatccggctcagtactacccgtcccccgtgccccagtacgccccgagggtcctgacgcaggcttccaaccccgtcgtctgcacgcagcccaaatccccatccgggacagtgtgcacctcaaagactaagaaagcactgtgcatcaccttgaccctggggaccttcctcgtgggagctgcgctggccgctggcctactctggaagttcatgggcagcaagtgctccaactctgggatagagtgcgactcctcaggtacctgcatcaacccctctaactggtgtgatggcgtgtcacactgccccggcggggaggacgagaatcggtgtgttcgcctctacggatcaaacttcatccttcaggtgtactcatctcagaggaagtcctggcaccctgtgtgccaagacgactggaacgagaactacgggcgggcggcctgcagggacatgggctataagaataatttttactctagccaaggaatagtggatgacagcggatccaccagctttatgaaactgaacacaagtgccggcaatgtcgatatctataaaaaactgtaccacagtgatgcctgttcttcaaaagcagtggtttctttacgctgtatagcctgcggggtcaacttgaactcaagccgccagagcaggattgtgggcggcgagagcgcgctcccgggggcctggccctggcaggtcagcctgcacgtccagaacgtccacgtgtgcggaggctccatcatcacccccgagtggatcgtgacagccgcccactgcgtggaaaaacctcttaacaatccatggcattggacggcatttgcggggattttgagacaatctttcatgttctatggagccggataccaagtagaaaaagtgatttctcatccaaattatgactccaagaccaagaacaatgacattgcgctgatgaagctgcagaagcctctgactttcaacgacctagtgaaaccagtgtgtctgcccaacccaggcatgatgctgcagccagaacagctctgctggatttccgggtggggggccaccgaggagaaagggaagacctcagaagtgctgaacgctgccaaggtgcttctcattgagacacagagatgcaacagcagatatgtctatgacaacctgatcacaccagccatgatctgtgccggcttcctgcaggggaacgtcgattcttgccagggtgacagtggagggcctctggtcacttcgaagaacaatatctggtggctgataggggatacaagctggggttctggctgtgccaaagcttacagaccaggagtgtacgggaatgtgatggtattcacggactggatttatcgacaaatgagggcagacggctaatccacatggtcttcgtccttgacgtcgttttacaagaaaacaatggggctggttttgcttccccgtgcatgatttactcttagagatgattcagaggtcacttcatttttattaaacagtgaacttgtctggctttggcactctctgccattctgtgcaggctgcagtggctcccctgcccagcctgctctccctaaccccttgtccgcaaggggtgatggccggctggttgtgggcactggcggtcaagtgtggaggagaggggtggaggctgccccattgagatcttcctgctgagtcctttccaggggccaattttggatgagcatggagctgtcacctctcagctgctggatgacttgagatgaaaaaggagagacatggaaagggagacagccaggtggcacctgcagcggctgccctctggggccacttggtagtgtccccagcctacctctccacaaggggattttgctgatgggttcttagagccttagcagccctggatggtggccagaaataaagggaccagcccttcatgggtggtgacgtggtagtcacttgtaaggggaacagaaacatttttgttcttatggggtgagaatatagacagtgcccttggtgcgagggaagcaattgaaaaggaacttgccctgagcactcctggtgcaggtctccacctgcacattgggtggggctcctgggagggagactcagccttcctcctcatcctccctgaccctgctcctagcaccctggagagtgcacatgccccttggtcctggcagggcgccaagtctggcaccatgttggcctcttcaggcctgctagtcactggaaattgaggtccatgggggaaatcaaggatgctcagtttaaggtacactgtttccatgttatgtttctacacattgctacctcagtgctcctggaaacttagcttttgatgtctccaagtagtccaccttcatttaactctttgaaactgtatcatctttgccaagtaagagtggtggcctatttcagctgctttgacaaaatgactggctcctgacttaacgttctataaatgaatgtgctgaagcaaagtgcccatggtggcggcgaagaagagaaagatgtgttttgttttggactctctgtggtcccttccaatgctgtgggtttccaaccaggggaagggtcccttttgcattgccaagtgccataaccatgagcactactctaccatggttctgcctcctggccaagcaggctggtttgcaagaatgaaatgaatgattctacagctaggacttaaccttgaaatggaaagtcttgcaatcccatttgcaggatccgtctgtgcacatgcctctgtagagagcagcattcccagggaccttggaaacagttggcactgtaaggtgcttgctccccaagacacatcctaaaaggtgttgtaatggtgaaaacgtcttccttctttattgccccttcttatttatgtgaacaactgtttgtctttttttgtatcttttttaaactgtaaagttcaattgtgaaaatgaatatcatgcaaataaattatgcgatttttttttcaaagtaaaaaaaaaaaaaaaaaaaaaaagggcggccgc

SEQ ID NO: 930 - DNA, 1479 bp, Homo sapiens
atggctttgaactcagggtcaccaccagctattggaccttactatgaaaaccatggataccaaccggaaaacccctatcccgcacagcccactgtggtccccactgtctacgaggtgcatccggctcagtactacccgtcccccgtgccccagtacgccccgagggtcctgacgcaggcttccaaccccgtcgtctgcacgcagcccaaatccccatccgggacagtgtgcacctcaaagactaagaaagcactgtgcatcaccttgaccctggggaccttcctcgtgggagctgcgctggccgctggcctactctggaagttcatgggcagcaagtgctccaactctgggatagagtgcgactcctcaggtacctgcatcaacccctctaactggtgtgatggcgtgtcacactgccccggcggggaggacgagaatcggtgtgttcgcctctacggatcaaacttcatccttcaggtgtactcatctcagaggaagtcctggcaccctgtgtgccaagacgactggaacgagaactacgggcgggcggcctgcagggacatgggctataagaataatttttactctagccaaggaatagtggatgacagcggatccaccagctttatgaaactgaacacaagtgccggcaatgtcgatatctataaaaaactgtaccacagtgatgcctgttcttcaaaagcagtggtttctttacgctgtatagcctgcggggtcaacttgaactcaagccgccagagcaggattgtgggcggcgagagcgcgctcccgggggcctggccctggcaggtcagcctgcacgtccagaacgtccacgtgtgcggaggctccatcatcacccccgagtggatcgtgacagccgcccactgcgtggaaaaacctcttaacaatccatggcattggacggcatttgcggggattttgagacaatctttcatgttctatggagccggataccaagtagaaaaagtgatttctcatccaaattatgactccaagaccaagaacaatgacattgcgctgatgaagctgcagaagcctctgactttcaacgacctagtgaaaccagtgtgtctgcccaacccaggcatgatgctgcagccagaacagctctgctggatttccgggtggggggccaccgaggagaaagggaagacctcagaagtgctgaacgctgccaaggtgcttctcattgagacacagagatgcaacagcagatatgtctatgacaacctgatcacaccagccatgatctgtgccggcttcctgcaggggaacgtcgattcttgccagggtgacagtggagggcctctggtcacttcgaagaacaatatctggtggctgataggggatacaagctggggttctggctgtgccaaagcttacagaccaggagtgtacgggaatgtgatggtattcacggactggatttatcgacaaatgagggcagacggctaa

SEQ ID NO: 931 - DNA, 1476 bp, Homo sapiens
atggctttgaactcagggtcaccaccagctattggaccttactatgaaaaccatggataccaaccggaaaacccctatcccgcacagcccactgtggtccccactgtctacgaggtgcatccggctcagtactacccgtcccccgtgccccagtacgccccgagggtcctgacgcaggcttccaaccccgtcgtctgcacgcagcccaaatccccatccgggacagtgtgcacctcaaagactaagaaagcactgtgcatcaccttgaccctggggaccttcctcgtgggagctgcgctggccgctggcctactctggaagttcatgggcagcaagtgctccaactctgggatagagtgcgactcctcaggtacctgcatcaacccctctaactggtgtgatggcgtgtcacactgccccggcggggaggacgagaatcggtgtgttcgcctctacggatcaaacttcatccttcaggtgtactcatctcagaggaagtcctggcaccctgtgtgccaagacgactggaacgagaactacgggcgggcggcctgcagggacatgggctataagaataatttttactctagccaaggaatagtggatgacagcggatccaccagctttatgaaactgaacacaagtgccggcaatgtcgatatctataaaaaactgtaccacagtgatgcctgttcttcaaaagcagtggtttctttacgctgtatagcctgcggggtcaacttgaactcaagccgccagagcaggattgtgggcggcgagagcgcgctcccgggggcctggccctggcaggtcagcctgcacgtccagaacgtccacgtgtgcggaggctccatcatcacccccgagtggatcgtgacagccgcccactgcgtggaaaaacctcttaacaatccatggcattggacggcatttgcggggattttgagacaatctttcatgttctatggagccggataccaagtagaaaaagtgatttctcatccaaattatgactccaagaccaagaacaatgacattgcgctgatgaagctgcagaagcctctgactttcaacgacctagtgaaaccagtgtgtctgcccaacccaggcatgatgctgcagccagaacagctctgctggatttccgggtggggggccaccgaggagaaagggaagacctcagaagtgctgaacgctgccaaggtgcttctcattgagacacagagatgcaacagcagatatgtctatgacaacctgatcacaccagccatgatctgtgccggcttcctgcaggggaacgtcgattcttgccagggtgacagtggagggcctctggtcacttcgaagaacaatatctggtggctgataggggatacaagctggggttctggctgtgccaaagcttacagaccaggagtgtacgggaatgtgatggtattcacggactggatttatcgacaaatgagggcagacggc

SEQ ID NO: 932 - protein, 492 aa, Homo sapiens
MALNSGSPPAIGPYYENHGYQPENPYPAQPTVVPTVYEVHPAQYYPSPVPQYAPRVLTQASNPVVCTQPKSPSGTVCTSKTKKALCITLTLGTFLVGAALAAGLLWKFMGSKCSNSGIECDSSGTCINPSNWCDGVSHCPGGEDENRCVRLYGSNFILQVYSSQRKSWHPVCQDDWNENYGRAACRDMGYKNNFYSSQGIVDDSGSTSFMKLNTSAGNVDIYKKLYHSDACSSKAVVSLRCIACGVNLNSSRQSRIVGGESALPGAWPWQVSLHVQNVHVCGGSIITPEWIVTAAHCVEKPLNNPWHWTAFAGILRQSFMFYGAGYQVEKVISHPNYDSKTKNNDIALMKLQKPLTFNDLVKPVCLPNPGMMLQPEQLCWISGWGATEEKGKTSEVLNAAKVLLIETQRCNSRYVYDNLITPAMICAGFLQGNVDSCQGDSGGPLVTSKNNIWWLIGDTSWGSGCAKAYRPGVYGNVMVFTDWIYRQMRADG

SEQ ID NO: 933 - protein, 100 aa, Homo sapiens
MALNSGSPPAIGPYYENHGYQPENPYPAQPTVVPTVYEVHPAQYYPSPVPQYAPRVLTQASNPVVCTQPKSPSGTVCTSKTKKALCITLTLGTFLVGAAL

SEQ ID NO: 934 - protein, 393 aa, Homo sapiens
LAAGLLWKFMGSKCSNSGIECDSSGTCINPSNWCDGVSHCPGGEDENRCVRLYGSNFILQVYSSQRKSWHPVCQDDWNENYGRAACRDMGYKNNFYSSQGIVDDSGSTSFMKLNTSAGNVDIYKKLYHSDACSSKAVVSLRCIACGVNLNSSRQSRIVGGESALPGAWPWQVSLHVQNVHVCGGSIITPEWIVTAAHCVEKPLNNPWHWTAFAGILRQSFMFYGAGYQVEKVISHPNYDSKTKNNDIALMKLQKPLTFNDLVKPVCLPNPGMMLQPEQLCWISGWGATEEKGKTSEVLNAAKVLLIETQRCNSRYVYDNLITPAMICAGFLQGNVDSCQGDSGGPLVTSKNNIWWLIGDTSWGSGCAKAYRPGVYGNVMVFTDWIYRQMRADG

SEQ ID NO: 935 - DNA, 22 bp, Artificial Sequence
  PCR Primer
gtgctgtgggagtccccgcggc

SEQ ID NO: 936 - DNA, 36 bp, Artificial Sequence
  PCR Primer
cgtgaactcgagtcattagattaacctcgtggacgc

SEQ ID NO: 937 - DNA, 22 bp, Artificial Sequence
  PCR Primer
gtgctgtgggagtccccgcggc

SEQ ID NO: 938 - DNA, 1158 bp, Homo sapiens
catatgcagcatcaccaccatcaccacgtgctgtgggagtccccgcggcagtgcagcagctggacactttgcgagggcttttgctggctgctgctgctgcccgtcatgctactcatcgtagcccgcccggtgaagctcgctgctttccctacctccttaagtgactgccaaacgcccaccggctggaattgctctggttatgatgacagagaaaatgatctcttcctctgtgacaccaacacctgtaaatttgatggggaatgtttaagaattggagacactgtgacttgcgtctgtcagttcaagtgcaacaatgactatgtgcctgtgtgtggctccaatggggagagctaccagaatgagtgttacctgcgacaggctgcatgcaaacagcagagtgagatacttgtggtgtcagaaggatcatgtgccacagatgcaggatcaggatctggagatggagtccatgaaggctctggagaaactagtcaaaaggagacatccacctgtgatatttgccagtttggtgcagaatgtgacgaagatgccgaggatgtctggtgtgtgtgtaatattgactgttctcaaaccaacttcaatcccctctgcgcttctgatgggaaatcttatgataatgcatgccaaatcaaagaagcatcgtgtcagaaacaggagaaaattgaagtcatgtctttgggtcgatgtcaagataacacaactacaactactaagtctgaagatgggcattatgcaagaacagattatgcagagaatgctaacaaattagaagaaagtgccagagaacaccacataccttgtccggaacattacaatggcttctgcatgcatgggaagtgtgagcattctatcaatatgcaggagccatcttgcaggtgtgatgctggttatactggacaacactgtgaaaaaaaggactacagtgttctatacgttgttcccggtcctgtacgatttcagtatgtcttaatcgcagctgtgattggaacaattcagattgctgtcatctgtgtggtggtcctctgcatcacaaggaaatgccccagaagcaacagaattcacagacagaagcaaaatacagggcactacagttcagacaatacaacaagagcgtccacgaggttaatctaatgactcgag

SEQ ID NO: 939 - DNA, 1020 bp, Homo sapiens
atgcagcatcaccaccatcaccacgactgccaaacgcccaccggctggaattgctctggttatgatgacagagaaaatgatctcttcctctgtgacaccaacacctgtaaatttgatggggaatgtttaagaattggagacactgtgacttgcgtctgtcagttcaagtgcaacaatgactatgtgcctgtgtgtggctccaatggggagagctaccagaatgagtgttacctgcgacaggctgcatgcaaacagcagagtgagatacttgtggtgtcagaaggatcatgtgccacagatgcaggatcaggatctggagatggagtccatgaaggctctggagaaactagtcaaaaggagacatccacctgtgatatttgccagtttggtgcagaatgtgacgaagatgccgaggatgtctggtgtgtgtgtaatattgactgttctcaaaccaacttcaatcccctctgcgcttctgatgggaaatcttatgataatgcatgccaaatcaaagaagcatcgtgtcagaaacaggagaaaattgaagtcatgtctttgggtcgatgtcaagataacacaactacaactactaagtctgaagatgggcattatgcaagaacagattatgcagagaatgctaacaaattagaagaaagtgccagagaacaccacataccttgtccggaacattacaatggcttctgcatgcatgggaagtgtgagcattctatcaatatgcaggagccatcttgcaggtgtgatgctggttatactggacaacactgtgaaaaaaaggactacagtgttctatacgttgttcccggtcctgtacgatttcagtatgtcttaatcgcagctgtgattggaacaattcagattgctgtcatctgtgtggtggtcctctgcatcacaaggaaatgccccagaagcaacagaattcacagacagaagcaaaatacagggcactacagttcagacaatacaacaagagcgtccacgaggttaatctaatgactcgag

SEQ ID NO: 940 - protein, 336 aa, Homo sapiens
MQHHHHHHDCQTPTGWNCSGYDDRENDLFLCDTNTCKFDGECLRIGDTVTCVCQFKCNNDYVPVCGSNGESYQNECYLRQAACKQQSEILVVSEGSCATDAGSGSGDGVHEGSGETSQKETSTCDICQFGAECDEDAEDVWCVCNIDCSQTNFNPLCASDGKSYDNACQIKEASCQKQEKIEVMSLGRCQDNTTTTTKSEDGHYARTDYAENANKLEESAREHHIPCPEHYNGFCMHGKCEHSINMQEPSCRCDAGYTGQHCEKKDYSVLYVVPGPVRFQYVLIAAVIGTIQIAVICVVVLCITRKCPRSNRIHRQKQNTGHYSSDNTTRASTRLI

SEQ ID NO: 941 - protein, 381 aa, Homo sapiens
MQHHHHHHVLWESPRQCSSWTLCEGFCWLLLLPVMLLIVARPVKLAAFPTSLSDCQTPTGWNCSGYDDRENDLFLCDTNTCKFDGECLRIGDTVTCVCQFKCNNDYVPVCGSNGESYQNECYLRQAACKQQSEILVVSEGSCATDAGSGSGDGVHEGSGETSQKETSTCDICQFGAECDEDAEDVWCVCNIDCSQTNFNPLCASDGKSYDNACQIKEASCQKQEKIEVMSLGRCQDNTTTTTKSEDGHYARTDYAENANKLEESAREHHIPCPEHYNGFCMHGKCEHSINMQEPSCRCDAGYTGQHCEKKDYSVLYVVPGPVRFQYVLIAAVIGTIQIAVICVVVLCITRKCPRSNRIHRQKQNTGHYSSDNTTRASTRLI

SEQ ID NO: 942 - DNA, 45 bp, Homo sapiens
ctgctggcgaacggcagaatgcctaccgtgctgcagtgcgtgaac

SEQ ID NO: 943 - protein, 15 aa, Homo sapiens
LLANGRMPTVLQCVN

SEQ ID NO: 944 - DNA, 1883 bp, Homo sapiens
tactttccaaccagcaggtgaagagctgaatcactaagggcacaaatgaaaagggaggggcaaaatatgaaggctttatatttcttctgagggacgcagctccagtctaacttgccactctgtgaacttcactactggaaagcaacaaaggcagtcggcataaaaatgggttctctcagcacagctaacgttgaattttgccttgatgtgttcaaagagctgaacagtaacaacataggagataacatcttcttttcttcgctgagtctgctttatgctctaagcatggtcctccttggtgccaggggagagactgcagagcaattggagaaggtgcttcattttagtcatactgtagactcattaaaaccagggttcaaggactcacctaagtgcagccaagctggaagaattcattccgagtttggtgtcgaattctctcaaatcaaccagccagactctaactgtaccctcagcattgccaacaggctctacgggacaaagacgatggcatttcatcagcaatatttaagctgttctgagaaatggtatcaagccaggttgcaaactgtggattttgaacagtctacagaagaaacgaggaaaatgattaatgcttgggttgaaaataaaactaatggaaaagtcgcaaatctctttggaaagagcacaattgacccttcatctgtaatggtcctggtgaataccatatatttcaaaggacaaaggcaaaataaatttcaaggtaaaaatgtaactgtggaaatgatgtatcaaattggaacatttaaactggcctttgtaaaggagccgcagatgcaagttcttgagctgccctacgttaacaacaaattaagcatgattattctgcttccagtaggcatagctaatctgaaacagatagaaaagcagctgaattcggggacgtttcatgagtggacaagctcttctaacatgatggaaagagaagttgaagtacacctccccagattcaaacttgaaattaagtatgagctaaattccctgttaaaacctctaggggtgacagatctcttcaaccaggtcaaagctgatctttctggaatgtcaccaaccaagggcctatatttatcaaaagccatccacaagtcatacctggatgtcagcgaagagggcacggaggcagcagcagccactggggacagcatcgctgtaaaaagcctaccaatgagagctcagttcaaggcgaaccaccccttcctgttctttataaggcacactcataccaacacgatcctattctgtggcaagcttgcctctccctaatcagatggggttgagtaaggctcagagttgcagatgaggtgcagagacaatcctgtgactttcccacggccaaaaagctgttcacacctcacacacctctgtgcctcagtttgctcatctgcaaaataggtctaggatttcttccaaccatttcatgagttgtgaagctaaggctttgttaatcatggaaaaaggtagacttatgcagaaagcctttctggctttcttatctgtggtgtctcatttgagtgctgtccagtgacatgatcaagtcaatgagtaaaattttaagggattagattttcttgacttgtatgtatctgtgagatcttgaataagtgacctgacatctctgcttaaagaaaaccagctgaagggcttcaactttgcttggatttttaaatattttccttgcatatgtaaatagaatgtggtgagttttagttcaaaattctctgttgagaataataaatgcatgaaataccttaaagctctgtgaagacttgtaacatggcagcaatcaaatggcttataaaaggatactttgaatgtggataaattgaaaaaaaaaaaaaaaa

SEQ ID NO: 945 - DNA, 2471 bp, Homo sapiens
tggaaagcaacaaaggcagtcggcataaaaatgggttctctcagcacagctaacgttgaattttgccttgatgtgttcaaagagctgaacagtaacaacataggagataacatcttcttttcttcgctgagtctgctttatgctctaagcatggtcctccttggtgccaggggagagactgcagagcaattggagaaggtgcttcattttagtcatactgtagactcattaaaaccagggttcaaggactcacctaagtgcagccaagctggaagaattcattccgagtttggtgtctaattctctcaaatcaaccagccagactctaactgtaccctcagcattgccaacaggctctacgggacaaagacgatggcatttcatcagcaatatttaagctgttctgagaaatggtatcaagccaggttgcaaactgtggattttgaacagtctacagaagaaacgaggaaaacgattaatgcttgggttgaaaataaaactaatggaaaagtcgcaaatctctttggaaagagcacaattgacccttcatctgtaatggtcctggtgaatgccatatatttcaaaggacaatggcaaaataaatttcaagtaagagagacagttaaaagtccttttcagctaagtgaggtaagtattttattttcagactcatgacaaatgttggaggatacaataatcatttaaggacaatttagaaagatgtagtgatttagtgaaaatattggtctaggtttctgttggttctttttattgtattttctacagattttcatttttcctttattaagtgacaataacttttatcacagagcacctaactggagacttgggatactaagattctctggcagaggagaaaacccattcttttcttaacgctctctcggcttattctttccatatatactgtggttatgttctccagcagcacactaaggctatctgtgttatttttttttctagagagtttcttgaggaaagattaaaaagaaaatgatttaatgatatatcctttttcttcccactaaaatcatgttagctaaaaatcctgactttgtttttggtagaccaagctatctctatatattattagaacaattcagtctctaaccatgacttattttaaattaaaaaaatggataacctttgcaaagggaagtaataaggaatctactttgtagtttctattttacccatgcctttagagtgttcatgcagatatccgtgttacgcaaggtaatcagtacacacacatgtgcactcacatatgtaagtatactataatctttttcttcttaacagggtaaaaatgtaactgtggaaatgatgtatcaaattggaacatttaaactggcctttgtaaaggagccgcagatgcaagttcttgagctgccctacgttaacaacaaattaagcatgattattctgcttccagtaggcatagctaatctgaaacagatagaaaagcagctgaattcggggacgtttcatgagtggacaagctcttctaacatgatggaaagagaagttgaagtacacctcccccgattcaaacttgaaactaagtatgagctaaattccctgttaaaatctctaggggtgacagatctcttcaaccaggtcaaagctgatctttctggaatgtcaccaaccaagggcctatatttatcaaaagccatccacaagtcatacctggatgtcagcgaagagggcacggaggcagcagcagccactggggacagcatcgctgtaaaaagcctaccaatgagagctcagttcaaggcgaaccaccccttccttttctttataaggcacactcataccaacacgatcctattctgtggcaagcttgcctctccctaatcagatggggttgagcaaggctcagagttgcagatgaggtgcagagacaatcctgtgactttcccacggccaaaaagctgttcacacctcacacacctctgtgcctcagtttgctcatctgcaaaataggtctaggatttcttccaaccatttcatgagttgtgaagctaaggctttgttaatcatggaaaaaggtagatttatgcagaaagcctttctggctttcttatctgtggtgtctcatttgagtgctgtccagtgacatgatcaagtcaatgagtaaaattttaagggattagattttcttgacttgtatgtatctgtgagatcttgaataagtgacctgacatctctgcttaaagaaaaccagctgaagggcttcaactttgcttggatttttaaatattttccttgcatatgtaaatagaatgtggtgagttttagttcaaaattctctgttgagaataataaatgcatgaaataccttaaagctctgtgaagacttgtaacatggcagcaatcaaatggcttataaaaggatactttgaatgtggataaattgaattcaaaaaaaaaaaaaaaaaaaa

SEQ ID NO: 946 - protein, 379 aa, Homo sapiens
MGSLSTANVEFCLDVFKELNSNNIGDNIFFSSLSLLYALSMVLLGARGETAEQLEKVLHFSHTVDSLKPGFKDSPKCSQAGRIHSEFGVEFSQINQPDSNCTLSIANRLYGTKTMAFHQQYLSCSEKWYQARLQTVDFEQSTEETRKMINAWVENKTNGKVANLFGKSTIDPSSVMVLVNTIYFKGQRQNKFQGKNVTVEMMYQIGTFKLAFVKEPQMQVLELPYVNNKLSMIILLPVGIANLKQIEKQLNSGTFHEWTSSSNMMEREVEVHLPRFKLEIKYELNSLLKPLGVTDLFNQVKADLSGMSPTKGLYLSKAIHKSYLDVSEEGTEAAAATGDSIAVKSLPMRAQFKANHPFLFFIRHTHTNTILFCGKLASP

SEQ ID NO: 947 - protein, 617 aa, Homo sapiens
  variant (1)...(617): Xaa = Any amino acid
MGSLSTANVEFCLDVFKELNSNNIGDNIFFSSLSLLYALSMVLLGARGETAEQLEKVLHFSHTVDSLKPGFKDSPKCSQAGRIHSEFGVXFSQINQPDSNCTLSIANRLYGTKTMAFHQQYLSCSEKWYQARLQTVDFEQSTEETRKTINAWVENKTNGKVANLFGKSTIDPSSVMVLVNAIYFKGQWQNKFQVRETVKSPFQLSEVSILFSDSXQMLEDTIIIXGQFRKMXXFSENIGLGFCWFFLLYFLQIFIFPLLSDNNFYHRAPNWRLGILRFSGRGENPFFSXRSLGLFFPYILWLCSPAAHXGYLCYFFFXRVSXGKIKKKMIXXYILFLPTKIMLAKNPDFVFGRPSYLYILLEQFSLXPXLILNXKNGXPLQREVIRNLLCSFYFTHAFRVFMQISVLRKVISTHTCALTYVSILXSFSSXQGKNVTVEMMYQIGTFKLAFVKEPQMQVLELPYVNNKLSMIILLPVGIANLKQIEKQLNSGTFHEWTSSSNMMEREVEVHLPRFKLETKYELNSLLKSLGVTDLFNQVKADLSGMSPTKGLYLSKAIHKSYLDVSEEGTEAAAATGDSIAVKSLPMRAQFKANHPFLFFIRHTHTNTILFCGKLASP

SEQ ID NO: 948 - DNA, 729 bp, Homo sapiens
atgcagcatcaccaccatcaccacctcagggttccggagccgcggcccggggaggcgaaagcggagggggccgcgccgccgaccccgtccaagccgctcacgtccttcctcatccaggacatcctgcgggacggcgcgcagcggcaaggcggccgcacgagcagccagagacagcgcgacccggagccggagccagagccagagccagagggaggacgcagccgcgccggggcgcagaacgaccagctgagcaccgggccccgcgccgcgccggaggaggccgagacgctggcagagaccgagccagaaaggcacttggggtcttatctgttggactctgaaaacacttcaggcgcccttccaaggcttccccaaacccctaagcagccgcagaagcgctcccgagctgccttctcccacactcaggtgatcgagttggagaggaagttcagccatcagaagtacctgtcggcccctgaacgggcccacctggccaagaacctcaagctcacggagacccaagtgaagatatggttccagaacagacgctataagactaagcgaaagcagctctcctcggagctgggagacttggagaagcactcctctttgccggccctgaaagaggaggccttctcccgggcctccctggtctccgtgtataacagctatccttactacccatacctgtactgcgtgggcagctggagcccagctttttggtaatga

SEQ ID NO: 949 - protein, 16 aa, Homo sapiens
REISFEACLTQMFFIH

SEQ ID NO: 950 - protein, 18 aa, Homo sapiens
DRYVAICHPLRHAAVLNN

SEQ ID NO: 951 - protein, 13 aa, Homo sapiens
KRLAFCHSNVLSH

SEQ ID NO: 952 - protein, 15 aa, Homo sapiens
HQDVMKLAYADTLPN

SEQ ID NO: 953 - protein, 14 aa, Homo sapiens
RTVLQLPSKSERAK

SEQ ID NO: 954 - protein, 12 aa, Homo sapiens
HRFGNSLHPIVR

SEQ ID NO: 955 - protein, 15 aa, Homo sapiens
NPIIYGAKTKQIRTR

SEQ ID NO: 956 - protein, 14 aa, Homo sapiens
KISCDKDLQAVGGK

SEQ ID NO: 957 - protein, 15 aa, Homo sapiens
YSEGKIFFYFLGNQA

SEQ ID NO: 958 - protein, 15 aa, Homo sapiens
VTQIHKTLSHGDITM

SEQ ID NO: 959 - protein, 15 aa, Homo sapiens
ITTWTHCHTTTGTRD

SEQ ID NO: 960 - protein, 15 aa, Homo sapiens
LHTITPPHTLPVDTR

SEQ ID NO: 961 - protein, 15 aa, Homo sapiens
GMARFPQPECLPPYC

SEQ ID NO: 962 - protein, 15 aa, Homo sapiens
MALRASWLPGGGPQA

SEQ ID NO: 963 - protein, 15 aa, Homo sapiens
AYACRAGPGWLKEQP

SEQ ID NO: 964 - protein, 15 aa, Homo sapiens
QSLPQGSYVTVGFLV

SEQ ID NO: 965 - protein, 15 aa, Homo sapiens
PQICACQTRPNWLNE

SEQ ID NO: 966 - protein, 15 aa, Homo sapiens
HLRSKVYAAFGGSSP

SEQ ID NO: 967 - DNA, 1292 bp, Homo sapiens
tgtggtcattgaggacaagtcaacgagagattcccgagtacgtctacagtgagccttgtgggtgaaggtactctacagtgtggtcattgaggacaagttgacgagagagtcccaagtacgtccacggtcagccttgcggtaagcttgtgtgcttagaggaacccagggtaacgatggggcaaactgaaagtaaatatgcctcttatctcagctttattaaaattcttttaagaagagggggagttagagcttctacagaaaatctaattacgctatttcaaacaatagaacaattctgcccatggtttccagaacagggaactttagatctaaaagattgggaaaaaattggcaaagaattaaaacaagcaaatagggaaggtaaaatcatcccacttacagtatggaatgattgggccattattaaagcaactttagaaccatttcaaacaggagaagatattgtttcagtttctgatgcccctaaaagctgtgtaacagattgtgaagaagaggcagggacagaatcccagcaaggaacggaaagttcacattgtaaatatgtagcagagtctgtaatggctcagtcaacgcaaaatgttgactacagtcaattacaggagataatataccctgaatcatcaaaattgggggaaggaggtccagaatcattggggccatcagagcctaaaccacgatcgccatcaactcctcctcccgtggttcagatgcctgtaacattacaacctcaaacgcaggttagacaagcacaaaccccaagagaaaatcaagtagaaagggacagagtctctatcccggcaatgccaactcagatacagtatccacaatatcagccggtagaaaataagacccaaccgctggtagtttatcaataccggctgccaaccgagcttcagtatcggcctccttcagaggttcaatacagacctcaagcggtgtgtcctgtgccaaatagcacggcaccataccagcaacccacagcgatggcgtctaattcaccagcaacacaggacgcggcgctgtatcctcagccgcccactgtgagacttaatcctacagcatcacgtagtggacagggtggtgcactgcatgcagtcattgatgaagccagaaaacagggcgatcttgaggcatggcggttcctggtaattttacaactggtacaggccggggaagagactcaagtaggagcgcctgcccgagctgagactagatgtgaacctttcaccatgaaaatgttaaaagatataaaggaaggagttaaacaatat

SEQ ID NO: 968 - protein, 373 aa, Homo sapiens
MGQTESKYASYLSFIKILLRRGGVRASTENLITLFQTIEQFCPWFPEQGTLDLKDWEKIGKELKQANREGKIIPLTVWNDWAIIKATLEPFQTGEDIVSVSDAPKSCVTDCEEEAGTESQQGTESSHCKYVAESVMAQSTQNVDYSQLQEIIYPESSKLGEGGPESLGPSEPKPRSPSTPPPVVQMPVTLQPQTQVRQAQTPRENQVERDRVSIPAMPTQIQYPQYQPVENKTQPLVVYQYRLPTELQYRPPSEVQYRPQAVCPVPNSTAPYQQPTAMASNSPATQDAALYPQPPTVRLNPTASRSGQGGALHAVIDEARKQGDLEAWRFLVILQLVQAGEETQVGAPARAETRCEPFTMKMLKDIKEGVKQY

SEQ ID NO: 969 - DNA, 50 bp, Homo sapiens
gcctgtgatgtctccgtacgtgtggtggtgggtgagcccaccgaggccag

SEQ ID NO: 970 - DNA, 31 bp, Homo sapiens
tctgcctgtgatgtctccgtacgtgtggtgg

SEQ ID NO: 971 - DNA, 45 bp, Homo sapiens
ggggcctctgcctgtgatgtctccgtacgtgtggtggtgggtgag

SEQ ID NO: 972 - DNA, 60 bp, Homo sapiens
ttttacacggatttcgtgggcgaggggctgtaccagggcgtgcccagagctgagccgggc

SEQ ID NO: 973 - DNA, 30 bp, Homo sapiens
acggatttcgtgggcgaggggctgtaccag

SEQ ID NO: 974 - DNA, 24 bp, Homo sapiens
acggatttcgtgggcgaggggctg

SEQ ID NO: 975 - DNA, 32 bp, Homo sapiens
ttttacacggatttcgtgggcgaggggctgta

SEQ ID NO: 976 - DNA, 30 bp, Homo sapiens
tacacggatttcgtgggcgaggggctgtac

SEQ ID NO: 977 - protein, 16 aa, Homo sapiens
ACDVSVRVVVGEPTEA

SEQ ID NO: 978 - protein, 11 aa, Homo sapiens
SACDVSVRVVV

SEQ ID NO: 979 - protein, 15 aa, Homo sapiens
GASACDVSVRVVVGE

SEQ ID NO: 980 - protein, 10 aa, Homo sapiens
TDFVGEGLYQ

SEQ ID NO: 981 - protein, 8 aa, Homo sapiens
TDFVGEGL

SEQ ID NO: 982 - protein, 10 aa, Homo sapiens
YTDFVGEGLY

SEQ ID NO: 983 - protein, 20 aa, Homo sapiens
FYTDFVGEGLYQGVPRAEPG

SEQ ID NO: 984 - protein, 10 aa, Homo sapiens
FYTDFVGEGL

SEQ ID NO: 985 - protein, 19 aa, Homo sapiens
GLSAPSLSHCCPCRARLAF

SEQ ID NO: 986 - protein, 21 aa, Homo sapiens
ARLAFRNLGALLPRLHQLCCR

SEQ ID NO: 987 - protein, 30 aa, Homo sapiens
LAILDSAFLLSQVAPSLFMGSIVQLSQSVT

SEQ ID NO: 988 - protein, 15 aa, Homo sapiens
RPLLANDLMLIKLDE

SEQ ID NO: 989 - protein, 15 aa, Homo sapiens
SQCPTAGNSCLVSGW

SEQ ID NO: 990 - protein, 15 aa, Homo sapiens
MFCAGGGQDQKDSCN

What is claimed:

1. An isolated polynucleotide comprising a sequence selected from the group consisting of:
(a) sequences provided in SEQ ID NO: 1-111, 115-171, 173-175, 177, 179-305, 307-315, 326, 328, 330, 332-335, 340-375, 381, 382 and 384-476, 524, 526, 530, 531, 533, 535, 536, 552, 569-572, 587, 591, 593-606, 618-705, 709-774, 777, 789, 817, 823, 824, 878, 880-882, 894, 896, 907, 908, 916-919, 929-931, 938, 939, 942, 944, 945, 948, 967 and 969-976;
(b) complements of the sequences provided in SEQ ID NO: 1-111, 115-171, 173-175, 177, 179-305, 307-315, 326, 328, 330, 332-335, 340-375, 381, 382 and 384-476, 524, 526, 530, 531, 533, 535, 536, 552, 569-572, 587, 591, 593-606, 618-705, 709-774, 777, 789, 817, 823, 824, 878, 880-882, 894, 896, 907, 908, 916-919, 929-931, 938, 939, 942, 944, 945, 948, 967 and 969-976;
(c) sequences consisting of at least 20 contiguous residues of a sequence provided in SEQ ID NO: 1-111, 115-171, 173-175, 177, 179-305, 307-315, 326, 328, 330, 332-335, 340-375, 381, 382 and 384-476, 524, 526, 530, 531, 533, 535, 536, 552, 569-572, 587, 591, 593-606, 618-705, 709-774, 777, 789, 817, 823, 824, 878, 880-882, 894, 896, 907, 908, 916-919, 929-931, 938, 939, 942, 944, 945, 948, 967 and 969-976;
(d) sequences that hybridize to a sequence provided in SEQ ID NO: 1-111, 115-171, 173-175, 177, 179-305, 307-315, 326, 328, 330, 332-335, 340-375, 381, 382 and 384-476, 524, 526, 530, 531, 533, 535, 536, 552, 569-572, 587, 591, 593-606, 618-705, 709-774, 777, 789, 817, 823, 824, 878, 880-882, 894, 896, 907, 908, 916-919, 929-931, 938, 939, 942, 944, 945, 948, 967 and 969-976 under moderately stringent conditions;
(e) sequences having at least 75% identity to a sequence of SEQ ID NO: 1-111, 115-171, 173-175, 177, 179-305, 307-315, 326, 328, 330, 332-335, 340-375, 381, 382 and 384-476, 524, 526, 530, 531, 533, 535, 536, 552, 569-572, 587, 591, 593-606, 618-705, 709-774, 777, 789, 817, 823, 824, 878, 880-882, 894, 896, 907, 908, 916-919, 929-931, 938, 939, 942, 944, 945, 948, 967 and 969-976;
(f) sequences having at least 90% identity to a sequence of SEQ ID NO: 1-111, 115-171, 173-175, 177, 179-305, 307-315, 326, 328, 330, 332-335, 340-375, 381, 382 and 384-476, 524, 526, 530, 531, 533, 535, 536, 552, 569-572, 587, 591, 593-606, 618-705, 709-774, 777, 789, 817, 823, 824, 878, 880-882, 894, 896, 907, 908, 916-919, 929-931, 938, 939, 942, 944, 945, 948, 967 and 969-976; and
(g) degenerate variants of a sequence provided in SEQ ID NO: 1-111, 115-171, 173-175, 177, 179-305, 307-315, 326, 328, 330, 332-335, 340-375, 381, 382 and 384-476, 524, 526, 530, 531, 533, 535, 536, 552, 569-572, 587, 591, 593-606, 618-705, 709-774, 777, 789, 817, 823, 824, 878, 880-882, 894, 896, 907, 908, 916-919, 929-931, 938, 939, 942, 944, 945, 948, 967 and 969-976.

2. An isolated polypeptide comprising an amino acid sequence selected from the group consisting of:
(a) sequences recited in SEQ ID NO: 112-114, 172, 176, 178, 327, 329, 331, 336, 339, 376-380, 383, 477-483, 496, 504, 505, 519, 520, 522, 525, 527, 532, 534, 537-551, 553-568, 573-586, 588-590, 592, 706-708, 775, 776, 778, 780, 781, 811, 814, 818, 826, 827, 853, 855, 858, 860-862, 866-877, 879, 883-893, 895, 897, 898, 909-915, 920-928, 932-934, 940, 941, 943, 946, 947, 949-966, 968 and 977-990;
(b) sequences having at least 70% identity to a sequence of SEQ ID NO: 112-114, 172, 176, 178, 327, 329, 331, 336, 339, 376-380, 383, 477-483, 496, 504, 505, 519, 520, 522, 525, 527, 532, 534, 537-551, 553-568, 573-586, 588-590, 592, 706-708, 775, 776, 778, 780, 781, 811, 814, 818, 826, 827, 853, 855, 858, 860-862, 866-877, 879, 883-893, 895, 897, 898, 909-915, 920-928, 932-934, 940, 941, 943, 946, 947, 949-966, 968 and 977-990;
(c) sequences having at least 90% identity to a sequence of SEQ ID NO: 112-114, 172, 176, 178, 327, 329, 331, 336, 339, 376-380, 383, 477-483, 496, 504, 505, 519, 520, 522, 525, 527, 532, 534, 537-551, 553-568, 573-586, 588-590, 592, 706-708, 775, 776, 778, 780, 781, 811, 814, 818, 826, 827, 853, 855, 858, 860-862, 866-877, 879, 883-893, 895, 897, 898, 909-915, 920-928, 932-934, 940, 941, 943, 946, 947, 949-966, 968 and 977-990;
(d) sequences encoded by a polynucleotide of claim 1;
(e) sequences having at least 70% identity to a sequence encoded by a polynucleotide of claim 1; and
(f) sequences having at least 90% identity to a sequence encoded by a polynucleotide of claim 1.

3. An expression vector comprising a polynucleotide of claim 1 operably linked to an expression control sequence.

4. A host cell transformed or transfected with an expression vector according to claim 3.

5. An isolated antibody, or antigen-binding fragment thereof, that specifically binds to a polypeptide of claim 2.

6. A method for detecting the presence of a cancer in a patient, comprising the steps of:
(a) obtaining a biological sample from the patient;
(b) contacting the biological sample with a binding agent that binds to a polypeptide of claim 2;
(c) detecting in the sample an amount of polypeptide that binds to the binding agent; and
(d) comparing the amount of polypeptide to a predetermined cut-off value and therefrom determining the presence of a cancer in the patient.

7. A fusion protein comprising at least one polypeptide according to claim 2.

8. An oligonucleotide that hybridizes to a sequence recited in SEQ ID NO: 1-111, 115-171, 173-175, 177, 179-305, 307-315, 326, 328, 330, 332-335, 340-375, 381, 382 and 384-476, 524, 526, 530, 531, 533, 535, 536, 552, 569-572, 587, 591, 593-606, 618-705, 709-774, 777, 789, 817, 823, 824, 878, 880-882, 894, 896, 907, 908, 916-919, 929-931, 938, 939, 942, 944, 945, 948, 967 and 969-976 under moderately stringent conditions.

9. A method for stimulating and/or expanding T cells specific for a tumor protein, comprising contacting T cells with at least one component selected from the group consisting of:
(a) polypeptides according to claim 2;
(b) polynucleotides according to claim 1; and
(c) antigen-presenting cells that express a polypeptide according to claim 2,
under conditions and for a time sufficient to permit the stimulation and/or expansion of T cells.

10. An isolated T cell population, comprising T cells prepared according to the method of claim 9.

11. A composition comprising a first component selected from the group consisting of physiologically acceptable carriers and immunostimulants, and a second component selected from the group consisting of:
(a) polypeptides according to claim 2;
(b) polynucleotides according to claim 1;
(c) antibodies according to claim 5;
(d) fusion proteins according to claim 7;
(e) T cell populations according to claim 10; and
(f) antigen presenting cells that express a polypeptide according to claim 2.

12. A method for stimulating an immune response in a patient, comprising administering to the patient a composition of claim 11.

13. A method for the treatment of a cancer in a patient, comprising administering to the patient a composition of claim 11.

14. A method for determining the presence of a cancer in a patient, comprising the steps of:
(a) obtaining a biological sample from the patient;
(b) contacting the biological sample with an oligonucleotide according to claim 8;
(c) detecting in the sample an amount of a polynucleotide that hybridizes to the oligonucleotide; and
(d) compare the amount of polynucleotide that hybridizes to the oligonucleotide to a predetermined cut-off value, and therefrom determining the presence of the cancer in the patient.

15. A diagnostic kit comprising at least one oligonucleotide according to claim 8.

16. A diagnostic kit comprising at least one antibody according to claim 5 and a detection reagent, wherein the detection reagent comprises a reporter group.

17. A method for inhibiting the development of a cancer in a patient, comprising the steps of:
(a) incubating CD4+ and/or CD8+ T cells isolated from a patient with at least one component selected from the group consisting of: (i) polypeptides according to claim 2; (ii) polynucleotides according to claim 1; and (iii) antigen presenting cells that express a polypeptide of claim 2, such that T cell proliferate;
(b) administering to the patient an effective amount of the proliferated T cells,
and thereby inhibiting the development of a cancer in the patient.
